United States Patent Application Publication US 2026/0258423 A1 - sequence listing, part 24

SEQ ID NO: 167803 - DNA, 46709983 bp, Homo sapiens (residues 28,359,639-30,027,852 of 46,709,983)
  source 1..46709983: mol_type = genomic DNA
tctaattctatgagtttgactattttagatacctcatgtcaggggaatcatgcaattttagtcgttctatgactggcttatttcacttagcatcaggtccccaggatcatccaaggtgttgcatatagcaggactttcttttttaaccttgaataaatattacattgtaagtacgtaccatattttctttatttgttcatcttagaaggatgtttattcatttctaatcttgttattgcaaatagtgatgcaatgaacattggagtgctaacatctcttctagattctaattcttttggataaatactagaagtgggagtagtgtactatgtgatagctctatttttaatattttgagaacactccttactcttttccatagctgctgcactatttggcatttctccaacagtgctcaagagatccaacttctccacatcctcaccaacacctgttgtgttttgattgttgaaaacagccatattaaaaagtgtgaggtgatatatcattatggctttgatttgcatttctctgatgattactgacaatgaacatcttttcttttacctgttggccatttgtatgtctcaatgactgtttattcaagactttagcccatttcttaatgtggtagtttttttactattaagttataaaagtttccttatatattttggaaattaatcatttatgtaataaatggtttacaaagattttattccattccctagattgccttttcactctattgattatttcctttgatgtcagaaactttctagttcaatgttggcactcttgggaatcagttattatataattttgcgttttaaattttttattttaattttgtattttgcttttcttgcctgcttttgatgtcatattcatgaatttattgccaataccaatgtcttcaagttttacagtttcaggtctgatacgtaagtctttaatccactttgagttgaatttacatatgctttaatataaaggtccaattctattcttttgcctgtggatatccagttgtgccagagccatttgttgaagaaattatcctttctcaattgtatgacctttgtcaaagataatttgaccatatatgtgtgaatttattttcgggttctctattctgttccatttttctatgtgtttgtctttatgccagtaacatattatttttattttttattgatagatgaaactttgtgtatttaccatgtataatgtattgttttaaagtatacatacaatgttgaataactaactagctaattaacatatgcatcccttcacatggttatcatttttgtgatgagaacactttatatccacttttcttagctattactatagctttggaataaattttgaaattaggaagtgtgatgcctctaagtttgttcctcttgatcaagattgttttagctatttgaggtattttgtactcccatataaattttagaattattttttctaattctataaaaaattccattgggaatttgatagggattacattgaatctgtagattactttgggcagtattgacattttaacaatattaagtctttcaatctatgaacacaggatatcttccatctgcttgtatcttgtttatttcatcaacgtttcgtagttttctgtgtacaagtattttgcctccttaatatgttttgctttttgttgctttataagtggacttgttttcctaatttttttcagacagattgttgtatagaaactcaactgatttttgtatgttgacttgtatcccacaattttactgacgttattagtcctaatagtttttttaatggagtctttagggttttctatgtataaaaactgtatctgcaaacaagagacaatgctaatttttcctttctgatttgagtgccacttttcttttcttgcctaatttctcaggctaggaattccagtactatattaaataaaacaacaaaagtgacaaaagagggcatccttgctttgttccaaatcatagaagaaaaacttccaagttttcaccagtaagtatgatgtcaactgtgggctcttcatctatggcctttattatgttgaggtaaagtctttctatgcctagtttgtttagagcttgtatcactaaaatgttgttgaattttgtcaaacactttttccacatctattaaaatgatatgtatattatagattttattctgttagttcattcaggctgttataacaaatattttagattgggtggttaataaacagaaatttacttctcacagttttagaggatgagatgttcacaattgaggcactggcctcttgtataagagcactaattccaatcatctccctaaggctctacctcctaatgtcatcacattggtgatgaggtattaacgcgtgaattttggggtgacacaaacattcagaccatagaagtggcatagtacattaattatttttgtatgttaaaacaatcgtgcatctcagagagcaatcccacttggtcatggtgtataatccttttaatgtgctgttgaattcagtttgctggtactttgttaaaaatttttacatcttcagggatattgacctgtagttttctttttttgtagtatatttgtctggatttggtatcagggtaatgttgagatctcgtaaaaaaacttttccagtttttttaaagagtctgagaaaggttgatgttaattcttccttatgtgtttggtagaatttaccagtgaagccatctggtgctgggcttttctttattaagaagtttctggacaatgatccaatcgtatataaatatatatagatatagatagacataatttataaataatataatttatattatattatatataattatatatttatatatcatatattatatatcatttatatatcatttaagtatatcatctatatataatatatgatatatatcatttatataatatatcatagaaatatatatatcattatataaatatatataatttatataatgatatataataacgttatatttatataatgatatatatttatatataaatatatataatgatatatacatatataacatctaatacattaatatattatatatcattgatatgtcattaatatatcagatgatacatcattaatatatcattaatatattagatattgatatatcactatattagatatcattgttgatatatcactataatatagtaatatattagatattatttgtattatatacaatatataaaaatatattacataaaattaatatattaaaattacataaaatacattatatatagcatacataacaaaatatatgctatatattatatagtatatttatgtatatttatttatactgatatatgtgtatatatattggtatgtgtacatatatatatgtataggtacgttctttgggatcagttgagacacgtcttctttcatttctgattttacttatttaactattctatcttcttttttagtctagctaaaggttgtcaattttgtctgtctttaaaatataccaacacttaggtttgctgactttttgtattgttttctattatctattgtgcttatttctcttctaaactgtacaatatcctttcttctgctaactttaggcttaggttgctcttcattttactttttcacctattttactcctttgaggtgtaaggttaggttatttattgaagatctttcttcgtttttaatgtaggcatttattaccataaacctccttcttagaactgcttttgctgcatcttagaaatgtttagtatgttgtatttttatttttgtttgtctcaaaatattttctaacttcccttttgatttttttcttttacccattggttgttgagaagtaagtgtttttaaatttccatatatttgtgaattttccagtgtttcttctgctcttgacttctagtttcatttcattgtggtcataaaagatacttagtataatttcaatcttcttaaatttgttagcattcattttgtgacctagcccgtgctcaatcctaaagaaatattcatgtacacatgagaagactttctattctgcttctcttgggttggatgttctacatatatctgttaagtccatttagtctatagtgttattcaagtcctctgtttacttattgatattctgtctggatgtctgtccattattgaaagtgtggcactgaagtctcctactattattgcatagctatttctaccctcagctttgtcataaatatacaaagctcatctgctgtatatatttagatgctctaatgttggaggtgtatgtacttataatcattgtatcttcctgggaaattgattgttttatcattacaaaacatcttttttatgtttagtgaaagtttttgacttaaaaatctattttgcctgatgcaagtgtatccacctttgttgtattttggttgccacttcaaccaaatttgccacatcaaatatctttttccatcccttcacttgtagctatatgtgtccttaaatctaatgtcagtttcatgtggatacagtatagttggatgactttttagtccattcagccactctaagccttttgattgggacatttaatcatttaaactttaaaagtttaaattaattaattatttataggaaaagatgtactattaacactttgtttgctgtttgtcttatagttcctttctctctttttgcctcctcagtttattttattttattttattttattttattttattttatttttgggggggtggagtttcgctcttgctgcttgggcaggaaagcaatggcgcaatctcagctcactgcaacctctgcctcccgggttcaagtgattctcctgcctcagcctccctagtaggtgagattacaggtgcccgccaccacgcctggctaattgtttgtatttttagtagagaacggggtttcaccacgttggtcaggctggtcttgaactcctgacctcaggtgatccgcccgcctcatccccccagggtgctgggattacaggtgtgagccaccgaacccggactctttttgtctcttgctcctttcatttgtgtttcattgatttttttttattgatatgcctttatttcttatttttatcttgtgctataggcattttattgtggttaccatgggacctacataaaatatcttacagttttaacagtatttttttaaaaaaataacaatttaacttcaagcatatgcaaaaacttttttctttccccacactcagttattgatttcctaatttaaattaagttatagtgtggatctattatcatattttaaaattatagttattttcaatacttttgtcttttatattagaattaaaagtgatttgtccaccaccattacaataatacagtattctgtatttgtgtatacatttatctttttttgttgttgttctgagatggagtctcactctgtctctgaggctggggtgcaatggcatgatctcggctcactgcaacctctgcctcccaggttcaagcaattctcccgcctcagcctcctgagtagctgggactacaggcgctgccacaacacccagcaaatttttgtattttaagtagagacaggatttcactatgttgtccaggctggtctagaactcctaacctcaggtgatccacccacctcagcctcccaaagtgctgaaattacaggcatgagccaccaggcccggccctatacattgatctttacaagtaagtttcatactctttatgccattctgttactggttagtatccttcccttttgacttgaagaactcccattagcatttcttgagaggcaaattgaatggtgatgagcttcctcagtttttgttagtctggaaaaattcttattcttctttatttttgaaggacatttttaccagctatggtatatttggttcatagtcattcatttgtttgtttcttttagcactttcaataaattgtcctactcccatctaacttgcaaagtttctgctgagaaaattaccttatagtcttgaggaggttcgcttatatgagacaagacatttttctcttgctactttcaaaattctctttggctttcgacaatttgattacaaagtggctacgtatagatttctttgggtttattcttttgggcttgggttgaggaggcagatttctggtctatatattcatttcctaacccagatttggcaaatttttagcattaacttttaaaatatgctttcagtattcttttttcctccttctaagatccccattttatatatatatatacacacacacatatatatatacacatatatacacatatatatacacatatatacacatatatatacacatatatacacacatatatacatatatacacatatatatacatatatacacatatatacacatatatatatacatatacacacatatatccatatatgtgtatatatgtatatatatatccatatatatgtgtgtgtatatatatgtgtatatatatccatatatatgtgtgtgtgtatatatatgtgtgtgtgtgtgtgtgtatatatatatatatatatatatatatatatatatatatatatatatatatatatatatatatatatatctccacttggtggtgtcccataagttccttaatctttcttcactcttgttttcttcggttttctttctgcttctatgactgaataatttttataaccaggctctgactttactaacgctctcttctatttgatctagtctacagttgaacttcattagtaaattgttcagttcagttattatattctttagtcccatgatttctgtttggtacgtttttaatatttcctgtctctttgttgaaattctcacattgtttatgcattattctccacacctcagtgagaaattttaagatgcttattttgcattatttgctagataaattatataactccatttaattcaggtaggtttctagagatttgtcttccttctttgactggaacatcattgcctagttctctatttctctttcctctctgtgttgctgtctaaatattacataaaatagtcacttcttccactcttcaaagactagccttgtctaggagaagttctcactaatcagcctggccagagattctgaagacctctcgaactgtaagttttctcaacccactttctttattatactcaccccccaaccaccacaggcatctagaatatgccagatgccatcaatactccaagacaagaaaaataaaaccagttcttcaggaagtccctgaaaaggttggattattgggtgctctaagtcaactctttcaatccccaaagaggagctgggagctgggatttttatctgctcactctgatctgtgcagtcaggtgagcagctgtagtgactagttgtgtgctaaaaaccctatgcctgctttgctcatgtcttatcaactatccttcatcacaaagtacataatggtactgtaggtgtcagtttacatgactggttttttttttccttcttagtgtcaatttttgtgagtatatagcaggtatatatatttatggggtacatgagatattttgatataggaatacatgcttaataaccacatcaagacaagtgatattcatcaccccaaacatttatcctttgtgttataaataatccagctacacacttttagttattttaaaatagaaaattaaattattattgcctttagtcaccctcttgcactatgaaatacaaggtcttatttatacttcctaactattttttgtacccattaaccatacctacttttattccatcaccaatcactacccttcccagccactggtaaccatccttccactctctatacccatgagtacaattcttttaatttctagctcccataaatacatgagaacacgcaaaatttgactttctgtgcctggcttatttcacttgacgtaatgacttccaagtcattatgttaatgacatgtgccattcatgctgctgcaaatgacaggatcttatttgttttaatagctgaatagtactcctttgtatatatgtaccacattttccttatttattcatctgctgagggacacttagtttgcttccaaatcatggttactgtgaatagtgctataataaacatgggagtgcagatatctattcaatctgttaatttcatttcttttggatatatacctagctgtgggattgtgggatcatacagtagctctatttttacttttttgaggaaacttcaaaccgttccagtagtggttgtactaatttacattcccactaactatgtacaaggtctccaccttcttactagcatttgtttctgcccatttttttttttttttggataaaagccatttttactggatgagatgatatctcactgtagttttgagatttgcatttctctgatgatcaatgatgttgagcaccttttcattcacctgatttttatttgtacatattcttttgtaaatgcctattcagatcttttgtccatattttaatcagattattaattttttcctatagagttgtttgagctatttatgtattctggtaactaacaattggacagatggatagtttacagatattttctaccatgcgatggggttatctcttcactttattgactgtatctattgctgtggagaagctttttaatttgatgttatgccatttgtctatttttgctttgcaaactgtttgtggggcattactcaaaatctttacttagcgcaatgtcctggagagtttctcaaatgttttcttgtagtcgtttcatagattgaggtctgaaatttaagtgtttaatccattttgatttgatttttttatatggcaagagatagaggtctagtttcattcttctgcatatggatatccagatttcccagcaccatttattgatgagacatttatttttccattgtatgttcttggtgtctttttttaaaatgagtttgttttgggttctctattctgttctatttgtctacgtgtctgtctttgtttattcgtttgtttgtttgtctgtttttggagacagagtcttgctctgttacccagcctagagtgcaatggcaaaatctcaactagctgcaaactctgcatccaaagttcaagcaattcttgtgcctcagccttacaagtagctgggtttacaggcatgtgccaccaaacctggctaatttttgtattttagtagagacggggtttcaccacgtcggccagactggtctcgaactgttggcctcaagtgatccaccagccctgggctcccaaattcttgggataacagtaggcatgagccactgcactgggtctatgtgtctgtcttcatgccaatattaatgctgttttggtcactataactctaatattatttgatgtcaggtaataggattcctctagttttgttctgcctgctcagaatagctttggctattctgagtcttttgtggttccatataaattttaggattattttttctatttctgtgaagaatgtcattggtattttgaaagggattgcattgaatctgtagattgctttgggtaatatggactttctaacaatattgattcttgaaattcatgaacatagaatatctttccatttttgtgtgttacttttttatttctttttcagattaatcacttttggcatataaaaatactactaatatctgtatattgatgttgtatcccatgatttactgaatttattagttctcatcattttttatttgctgcagtctttattttttccaaatataagattatatatgcatataaggataatttgactccttcctttccaatttggacgctcattatttctttatcttgtctgattgctctagctagaacttccagtactatgctgaataacagcagtgaaactgggcatccttgtcatgttctcaatcttagagaaaaggttttcagtttttccccattcagtatgatactagctgtggatctgtcatatatggcttttattatgttgagatatgtcctttctatactgtttttttagggtttttattatgaagggatgttgaattatatcaaatgcttctccagcattagttgaaattatcatattgtttttgtcttattctgttgttatatcaaattggttgatttgcatatattggaccatccttgcacctctgagataaatcccacttggccatgataaatcatctttttgatgtgttattgagttcagtttgctagtgttttgtgaagcatttgtgaatcaagattcatcagggatattggcctgtagttttgtttttttttttaaatgggtctgtctggttttggtatcaaagtaattctgggctcataaaatgagtttgaaaatattccctcttcttctgttattctaaatagtttgagtagtattggtattctttaaatgttaggtaaaattcagcaatgaagtcattatatctcaggcttgtctttcctgggagatgttttattatcattttgatctcatcacttattattggtctgttcagattgtaaatttcttcacggttcaatgttggtagactgtatgtgtctaaaaatttatccattccttctagatattccaatttatgggtatatagtgctcaaagcagcctctaataatcctttaaatttctgtactattggttgtaatgtctcctttttcatctctaattttatttgggtcttctctctttatcttagtctggctaaaggtttgtcaattttgtttaacttttcagaaaaccaactttgattcattttattaatcttttgtattgttttcttcatttcttcattttaatttcatttatttatgttctgatctttactgtttcttttctactactaatgttgggtttggtcagctatggcttttctagctttttaagatgcataattaggatgtttaaagtttttctgcttttttatgtaggcccttatagctataaactttcctcttagtattgctttaactgcataccataggttttagcatgctgtgtttcaattattgtttgtttgtaaaaatgtttcaatttcctccttaatttcttcactgaaccacaggtcattcgggagcataatgtttaatttccacgtatttgtatagtttctaaaattcctcttgttattgatttactatttttattatttattactttttatttcatttggtcagagaaggtatttgatttttttttaatttttaaagacttaatttttttggcctaatatatagtctatcattgaaaatgctccatgtgccaaggagaagaatgtgcattctgcagctgttggatgatattttctgtaaatatttattaggtccatttggtctgcagtgtggattaagtgcaaatttctttgttgattttcagtctcgatgatctgtgcaatgtgaaagttgagtgttgaagtctttagctattattatgttaaggttgatcactctctttagctctgacaatacttgcttcatatatctaggtgttcctgtgttggctgcatatacatttacaattattgtatcctcttggtaattttatcctgttgtcattatataatggtcttctttgtatttttttacagtttttgtcttaaaatctattttatctgatataaaatagatttatatctgataaatttatatctattttatctgatataaaaaatctattttatctgatataaaattatatctgacttgctctttcgtagttcccattggcatggaatatatttttccatctctttattttcagtctacttgtgtctttacaggtgaagtgcatttcttctagactatagatcattgggtcttgttttcttttttcttttctgttctttttttttaagacagagtctccctctgtcacctcagctggagtgcacagcatgatctcagctcactgcaacctccacctcctgagctctaagcaattctcctgcctcagcctccagagtagctgggactaaaggcacccccacgcctggctaattttgtatttttagtagagacggggtttcatcatgttggccagggtggtctcaaactcctgacctcaggaaatccacatgcctcggcctcccaaagtacagggactacatgcgtgagccacaacacctgggcttgttttcttatccatgagtctatgtcttttaattgaagagtttagttcatttatatttaatgttattcttgataagtaaagtcttactcctgtaagacttcttttgttttgttttgttgttgattttctgggtgtttttttgtgtgttctcttctttctgatttttcttcctgttttccttttagtagaagtgattttctccagcagactattttaatttcttgttcattattttttgttcatctgttgtgtgttatttgatttgcagttaccatagagcttgcaaataaaattgtataacttattattttaaactgataacagcttaacactgatggcataaatcaacaaatgaaataacaaacaagcaaaatactaatgaaaattctataaatttaacttcatcctcctacttttttgtgatggatatttatgatgggttttatcatataatttctatatttttattaaaattttaatttccatgattagtttttttattaagatttttttaaatttcaatagcttttggggtacaagtggttttcattacatggatgaaatttttagtggtgaattctgagattgtagttcacccatcaccaagtagggtagactgtagctaatgtgaagttatttatccctattacccctcttagtctctaaaatccatcatatcactctgtatgcctctgcatgctcatagcttacttcccacttataagtgagaaaatacaatattttggtttctactcctgtgttacttcatttagaataatggcctccagctccattgaagttgctgcaaaagacattatttcatttcttttaatggctgagtggtagttcatgtgtgtatataacacatttttttatccactcattagtcaatgggcacttaacttggttccacatctttgtaattgtgaattgtgctgcatttgcaaatgtctttttcatataatgacttcttttcctttgagtagatactcagtagtgggattgctggattgaatggtagatctacttatagctctttaaggaatctccatgctgttttccataaaggttgtactaatttacactcccaccagcagtttgtaagtattcgctttttcccacatccatggcaacatccattgctttttgactgtttaataatcgccttacttgcaggaataaggtggtatctcactgtagttttaatttgcatttccctaatgattagtgatgttgagcttttttttcatatgtttgttggtaatttgtgtatcttctttcaagaaatgtctattcatttcctatgctcacttttcaaaggaattatttgatttttttcttggtgtttgagttccttacagattctggatactagttctttgtcagatgcatagattgcaaatattttctcgtattctgtgggttatctgtttactctggtgagtatttcttctgctgtgcagaagatttttcatttaattatctctcatttatttctttttgtttttgttgcatttactttggggggtttagtcatgaattctttacctaggctgacatctaaaatagtttttctaacattgtcttctagaaattttatggtttcaaaccttacatttaagtctttgatccatcttaaatttttttatatggtgagaaataaggatacagttttattcttctatgtgtggcttgccagttatcccagcaccatttattaaatggagcgtcccttctccaatttgtgttttcatatgctttgtcagagatcaattggttgtatgtatttggctttatttctccattatctattctgttccattgttctatgactctatttttataccagtaccattctgttttggtaactatagccttgtaatacaacttgaagtcagataatgtgatgcctccagatttgtacttattgcttttgattgttttggttattctggctcttttttcatttcatataaattttaggattttctaattctgtggctactaatgttggtattttgatgggaattgcattaaatctgtaaattgctttgggtagtatggccattttcacaacactgtttcttccaatccatgagcatggaatgccattccatctgtttgtgccatctgtgatttctttcagtatttttttttagctctcttcttagagatctttcacctgtttggctatttctaggtattttatactctctacagctgtagtaaaatttattgagttcttgattttattcccagctgggttgttgttgatatatagcagtgttactaatttgtgtacgttgattgtgtaacctgagactttattaaatttgtttttcaaatctaagaatcttttggaggagtctttagaattttctagatgtactacactcatatcgtctataaatggcagtagtttgactttctctttttcaatttggatgccccatatttttttcttgtttaattgctctttttagtacttccagaactatgttgaatagaaatggtaaaagtgggtatttttgtcttttctggtctcagagaccagaatttctcagagaaaatgctttcaacttttcccattcagtatgatgttgactgtgggtttgtcatatatggattttattattttaagataggttctttctatgtctagtttgtcgagagtttttttttttcataaaggagagctaaaatttgtcagtcacttctgcatccattgagatgatcatatggtttttgtttttaattctgatgatgtgatgtatcacattttttaacttgcatatattaaaccacctctgcatcccttggacataacccactagatgattttgaattatctttttgatgtactgctggattcagttagctaatattttgttgaggttgtttgcctctatgttcaccacagaaattggtctgtagttttctttattttattttttgtgtcattcctggttttagtatcagagtgacattagcttcataaaatggtttagggatgatgtcttctttctcaatcttttggaatagtttcagtaggattgctactaattctttaaatgtctggtagaattcacctgtgaatttatctggtcctgggcttttattaatcggcaatttttaaattactggctcaagcttgctgcctcttattgatctgttcaaagtttctgtttattcctgatttaatctgagagggttgtatatttccaggaatttgtccatttactctaggttttctagtttgtatgaaaaaaggtgttccatagtggtctcaaatgatcttttgtatttctgtggtgttgattgtaatgtctccagtttcacttccaattgagtttatttggatcttctctgttcttttcattgttaatttagctaattgtctatcacatttgtttattttttcaaaaaaacagttttttctttcatggcttttttgggtttttttttaattgttgtttgaatttcatttagttctgctgtgatccttgttatttcttttcttcttctagttttgttttcatttgtttttgtttctccagttccttgaggatgacattaggttgccaatttgtgttctttcagactttttgatgtaggcatttagcactataaactttcctcttggcagtgcttttgctgtatcccaaaggttttgatgcctatgatggtggacaaggtgggaaagacttcctcttcttaagacccttcacatgcaccagggctttctaactgttggggtagagctgaagacttttcctgctcaacccagcactttaactgtgccactgctgaaagaagctttccaccagcagaaagacctagtgctcaaggcctgccactcagattattttgtcccacatggtgttcccttcatgtggtgcactcctccctcctctagagtactgtgagtgttgttgctcctctgggtctagctacccagtgaagctgcaacactccaggctggtgctggggaatgtttgcaaggggtccagtgatgtgacctgtctgaggcaatatcttttgtgtatgtggggtttctggtgttttgaaatagttctacaatgaacacttgttagttttgtcatcagaaataaattctttcagtgtagtgcaagtaagttctatgttttcaggcatttcctcagcctctgtctgcaagttaatctaaaaatgtgaaggatgtttgtattggcagattgagatgtgaattgtgcatacaaaggtaggaaaaggtagaaattatgttaatccaaatgtctttgtggaaaagtaataacctgtggcatgagacatgccttcaaagttaattaggtaattattagcctaaagaagcaaaaggtcaaagttgaatagttttagcgataaagcttaaaagattcattaacagaaaatgaacacaggaagttccagaactaactatgaatccctggttcttataactaaaaaggtcatcttctgatcgttttaactaatgttcctccatccaaaataatgaggaagacaattttgctctgctccccaacgcatgtaaataacataatgtcagagtgaagaggttaaaaattaacattttctagttgcatttagtgaaaatgtttaattttcaaaatcagtgaaacaaaggtagaatgcataagaatttgaaaccaattggaaaggagagttctgtcaaagtcaatactgaatcctctggttgactgaagaatggtagtgccgataacaaaaattcataatagcatttcagagacagaaagagagagagaagtgccacaaggcagagaccgtttcaagagaagaaacgctgacttttgtttggtttgtgttaagaatgcccacatagaaatacacaaaaggtggccaggttcggtggctcacccctgtaatcccagtgaggcatgagaatagggtttggagacagggaacataaggacttcctagaactaaatcacatggaaacattacagctatgacaggaaatatcctctccatttatgtagggaataggccaaatacatgactttgtaactttacttcatcctcttcatttacatagggtgtacaccaagtaaccaatggaaacatctagagggtatttaaacccccaaaaaaaatctgtaacagggcccttgagcccgtattctgaggcctgctcccacactgtggagtgtactttcattttcaataaatctctgcttttgttgcttcattctttgcttgctttgtttgtgcgttttgtccaattctttgttcaagacaccaagaacctggacaccctccagtggttaacagcagcactttgggagaccgaggaaggcagatcacttgaagccagaagtttaagaccagcctggtcaacatagcgaaaccctgtttctaccaaaaatacaaaaaattagtcaggtgtgatggcatacacctgtagttccagctacttgggaggctgaggcaggagaatcgcttgaatcagggaggcggaggttgcagtgagttgagatcgcaccactgcactccagcctgggtgacagagctagactctgtctcaaaaaagaaagaaacatagaaaaggcagctgaaaattagaatttacaggaactattcaagcaggtaagaacaagttggatatcatccacagcaacctgatcactgaagcaatgccctaaacttctacagattcatgaaaactaatagatcacagatagggagggagtagcagcagaattcagagagcttgttgagacagatgcagggggaaagaattttagggaatagaatttgaaagaggaaaaaagtaaacaaaaaatgagaaaaaatattttggaaaaacaatacgtaagagatacagcacaagttagtagaagagctgatcaagatagctttattgcccctggaaaacatctgaaaccacaaaaaaaaaggagcagagaaatatattttttaaattgtgacattatccaagactggatcttgagtgaagagcagtaaaatattaaggaggctgctttatgttgtagaaaatacatagattttggaagcaaatatacctgtgtttgaatattgacctggaagactttgaatcttgaaactctttgagcttcatcgttctttctgtgtaaattagagaggactatacttaggtcacacaattattttgaaaagttcaatgaatacaaacacataaaattcaaagcatgacgcaggacacatagttgtcattcaataaatgttacctcccttcaaggatataggtgctattattaaccataaattacagataaagaaactatttataacatacagtgcttgttcattcaactgatacttactgagcctctgctatgtggcaacgtatggttgaattgcaaggcaaatgatcctacacaatcttctggcaaggaaaggcaaataataaacaaaaaagtaaatacagatatcatataaagatgagtgcaattcagaaaaaaaacagcatggttttataaaggtatctgggtggctagcttaggttaggttgtcaaaatgcttcaccaaagaggtaggaagaaggaatcaggcagccatgtgaagattaagatgagggctattccaggaaaggtcaacagccagagtaaaggacttaggaagagtatgacacaactggcacatccaaggaacccaaggcatgtttagtccagccaagggttttcagtgggtgaggggaagagtggtaccagggaagtcagagtggccagatcacatagggcttggtaagccagacaaagtagcatgggtgttagtccacatgaaattgggcagcattggagtgctgtaagcaggccactaaaataatctgattttgtatttttcaaagatccctctgactactgggtgaagaaaagactgctaagggctaaaagccaaaggaggacacacatcaggaggtcattgtgttcatgtttagaggagaaacaaggactacttaagcaaaagaagtagggctgcagaggagcaggggaagacacatctttggggtatgcttaacagaacctgccaccatattagatgtgtgggaaagataagtatcaagggtaacacttggattattgttgggtacaagtgactgcaggggtgccaattgaccagatcagaaagcagaaagttggggggcagagaggagaggacaaatgggtggagagaagatgctagatacgcagttggatgaatataccttgaaaagttttgaggagattcagaaacagcaatttagaacaaatttcaaaccataggatggaatgagaactctgagggagagtatacaaaactgggagagaagaaatcccagcattcccccagggcatgtcaccctttcaagatcacacaaaaaaggaataggaaactgtgaaagaggagaagaatagataagtaaagcagaaggaaattcagaaaagtgtagaatcaggcaagccaggagaggaagatgtttcaacaaaggggccattctattcagtgctgagataataaagtatctataataattcaaaaggtgagtccattgaatttgaaagcatagaagttatggatgaccttgataagaagaatttttgtgaaaggatgagaactggaggccaaataagattttgtatcattttcctacatagcaacatagcctaggcatgccccccccatattaaatgtcagcaaaggaatgacttaaaatactgtatttattttctttatacaattatgtttaaatgtttttcatgcataattttgtttaatcaaaaatgtttatattctactttaaatctttttcttttccttattttttctacctttcattcaatatcagctctcctctgccacaaggtagtccacattgcaatgcagtagtgatcttcaatattttccctgtgcctagtcttatttatgtacatagatgcatacttgtatacagatatatagggcctggatttttgtccatatattgttttacctaaattgaatcataccataaatactttctgaatcttgctttccactcacctatatctcacagaaaccctgagtcaactggtatagcttaaatccattcttttttaacggttgggttatattctagatgtgagtttgctataattaaacttccctctatagactagcatttactttgttttcaatcaaacacatgatgattaatggtgccaaactacatcaaaactttattagcattataattccctttatttgaatgtttatgtctttagcacatttttatttttattttaaaaaatgcctgtgaatattcacacataaatctttcacatatctctaattcttttcttaggatagatgcttagatataaagatgaaaggcttgggtataaaaaacattttaagaaatcttgacaatggtgctaaatatctttctagaaaagtagaaatttgtattcttacagaagatgagagtgttaagaccactgttccacgccgtcagaactcatctgagcattatctgaagcaactatgccgtcacttggggaagatgcctcataaccctaacagaggcctgactgaagtgcgaacgctgatctaaacaaagcagtcaggaacacgctggctaggattctcctgacctcttcttttgttgccatagttacctttatcaataaatgtccaaagatgtaaccgaggcattgttgtcatagttcattggatggcaacaaactgttattgaataaattagtgtcccaattaagagtctttcctatttttcagcacctttccaatctgtaacaggtatttcctttcaaaacactgacagagtgaaataatgtgaacttcggttagaaatgagaattcttggtgtcaatttaaaatcttgacacccaggagaatgaaaattgtgatttctactaattatcccatgaggttttgctaaaaaagcatctgttttctagccctgcaccttgtatcctaaccaaaatataattgtccatgattaaagcacggttgtctgccttcctgaatcttgggcatcggaagtcagctttctgctgctaaatctccttttgggacagctctctagaagaactctgtagaaaagtttgtgttgcagagttttgcatggagttaactagcagacattaaaaacacaggataaactctgttgagtcaggcacttttgactttctgataatttttcaatctttcccctgaaaatcaggagatctggaaggttttctttcatatggaaaatactaaagtgcttaaaagaaacagaacacatttgcatatgtaacacaattccttatttgaaccagatttatttaataatcacaatctaattttagatagtttctgttttccagaaaatgcaagctagagatcattagagcaattagtacaagataaactttagaatattgcatttggccagaccagatgtaaaatcattagggaataaacataaccatgcttcatagaagcccactattcagacattagatgagttttagatccgatgacataatgacaggcctcatttaaaaagactaataacttagtgaaaaccatgtgtatttctacaacactatttgcattttactaatttaatctcacgcattcactgagggtactgacattttagccagtgtgagcatgagaagcaggtgactcatgtatgatctaaatgcaccacatcaagatgactagttgagttgtattcagaagggctgaaataatgtgttattatccaaaacaccatagttatataaaaacaggcagcatagcagatacctgaaaaaatgttttttttggatgaataagggaaaaatgttaacattttacagtttataagttgccttcattcccatttcttgagtacctgtcattactaggcaatgaactagtttttgagatgccatgatagataagatagagtatctctttttagaagctagcttaattctaaaccctgtaatccaggaatcataagtattattaagccatttgtacaagagctgaaaagcagttaaatatgatcaaatgaattgtccaagtcacagagtgctaagtgggaacattaggaccaatattcaggctttgcaactcagtccagtgtgctttttactatctttttctaaccatcttccaaattactgtttctttttatgacgtcaactccagctgacttaattgcaaccctggaaacaacttttccaagtgctcttttcatactctttggtgattcgttcatccatatatttgtgtatatgtgtgtgtatgtatctatgtgtgtttgtgtgtgggtgtgtgagtgtgtgtgctgtgtgtgggtacatagctaagaatctgattctacataatgctaatacaatcatttgggaagataaaaaatcctaccacctgtgtgtttggtccatttgaggaaaaataataagactgactatattttgtactaatttgcaaattatttagcaaatatttcttttaagtgttctaactgcaatttggagacactatatcataacaattaagaggatgatgtttaaaacaagaacagacttggggtggaatcctacttatctctcccactagttacttattctttttcatttttttctcctgtaaaatggagataatgagaacaacctcacaaaattgttataagaactagacgggctaacacacagagcctggtttataaccagcactcaataaacagtagatttcataattaaaaaggtgagatgatctttgaatgtaatcaccctaaaatcagtacagtgctttattaatctgactacatttttctcccaactcaccttattcactatttctagtgaaatatttttagttgtttcagaagttaaatctgtccaaattataaaaatgacaatatcatcaatgatcatatttaaaaataagacactggaagatccaaatgcattcaatgcctcagttatttacagtttggtatattgagatactgtgatgaataattttttttaacactacagacacatttactttgcatctcccattgcttctggcagagctattagttgctcaataaacatatagtaaacaagattatatagggtggtttattttaagtgcattgtgaacatgtcagatggcatattttaaaaagcaaactatccccatgatccaattagcactaaacaattaagattgacttccaccataaaactcaaatttgtccttttgtaatgctgagtaccattcaaaataagtagaagaaggttattatcatgttcaaaatacgtataaaaataactgcatgaaattttcagttttgcagtatgaataaattctggagatctaatgtacagcatggttactatagctattaatactgtattacctatttgaaatttgctaagagattagatcttaaatgttctcaccaaaaaaaaaatgtaactatataaggtgatatatatgttagtaagcttgattgtggcgatcatttcacaatgtatataaacaaaatatttcaccttaaatatatacaatttttatttgttaattatcccacaataaagctgggagaaattctaacacaaacaaaaaaaaaaataactgtacattgattgagagtttagatcattctggaaaatcaacacaggtttacaaacccagagcaaaagagaaattcaacactaacaaaaaagaaagttgatattccacaggcaggaattcttacttaaaatgtgaaatataactattactttttcaagaggatcaagcccacttgcactgaagctgtgatcccacgccacacaaagaggcatagaaaggaccagcaaaaaccatggaaggtggaaaatgatattggattattttctattaagtaacttacatcattgtctatcttgtagatagtcacaaacaatgagatgtaaaatgaagaaaaaaattaacatttttattttgagggcattgtcaaagaataagatgctattccctgaaattgaatgattttctaacctgacacttaccattccaaggccaagtgttattacttcctagcttttctgatggaagttttaccaacttaattcaaagtttctgtggacagtgtttagttaacatgagttatccttttattgatgatttgacaatgttgttatgaatatcaacttatggtttttctttatattaaatcagcccttctcctcttttgtattcagctctttcttctggtttttccttatggaaattatttctttggaaacccttttctatttttacttttctgtttcttatctgctattgatccaaaaaataaaactaagactcttataattgtgagttaggtaaaagtagatatacattaaaagcatgtttcaataattttttcataaaataaaacaaagagtttaatcacttgagaaattgtgccattttttgagatgtggaagactaaagagaagcaaatttggagaggaaaacaactaattattatttgttactggatacttttgtccattcaatatccaagtggagaaactgactagtatgttgagtaaatcaatcttggatttcaccattgagatgtacgctggagatgtagttgggggagttaccagatattgattgtctataaagcaatgggactaggtgagattattagggagtgatggtagatatggagaaaaaaagtagatcactgaggcttgaaccactccaacattgagcaatcaggaagaggaatggaattcacaaatgaaactgaaagaagaacccttgagataggagaataaccaaggggatgggctttaaaagctaagtgaaggaaatgtttcaaaagaagtgagtgtttgatcaactgtggagtaagatcaagattgaaaactgactattggatttgacaacatggaggtcatcaggccttactcaggacaatttgggtagaagtttggagaaaaaaaaaccaaccaaactaatgtaggcttgagagaaagggagaaaaagaaacagagttggtgagaaaatataaccactgtcaagactttttttcaaaaaaaattaaaagctgagaaatgtgcccaataactggacagaaaagtagaaccaaggaaggactttttttaaaaacatggaagattccagaatgtttgtatatagaagaaaatgcccagaagagaggaaatattgatgatacaggaaaaagaaaatatcattttatatgaggagtgaagaaattaagatgtcaaggatgacgtctaagtttctggcttgtgtaccttaatgaatagtgaaaatctttaccaaatcagaaaatagtggaaaattacgtttataagaaagatcattagttcattttgtaacatatgttaagttgcaggagttgtgagttatctaaaagacacaaataggcagtatggctcctagaagataaattagatctaaagaaataaactttaagacaactggacatgataataatttaagccaagggtgaaggcaagatctccaaggtcctcttaattttttgtggttaaaggatctcctatatccatgaacttatcaccctaatttgtgaaataaagaaaccatattttaaggacctgttttatatgttctgtacaggatattaccatgtgtgatgaatgttttaaatactgtgagtttgtaaagttaatgttattttatagatgaagaaacagaagtttagagaaactttgcccatgaaaagttcaaaatggtagagatggagttgaatctaggcttatcacaaccccaatgcctgttctgtctttcagctacatgagttgggatgttttatgatcccctctgaccattatagttacttcttaataggttttctgattttctagcaccttatctccattcctaagcttttttgtggataagaatcacttccagagtattgccctccccagacaaaccaatagtgtacacaatctgcacatttaataagcatcctcaagtgattctgatgcaagtaggctgtgaatctacaatgtaaaaggttaacaacgtaaacaatttacatgcaacaatgtaaaaggttacaatgtaaaaggataacaatgtaaaaggtttgctctactatagtctatgtgtggtgtcacattaatcctctaaaaggaaaactaactcatgctgcttgcttgattaataattgataagtacttagagtctcctatgacatgtcctagacctacttttcaagccagactgtctaaaccaatcttactatttttgtctgtattcctaaataataccttttccatccacataaatttgaagctccccttccacactcttagatgccctcttccagattccttacctccatgttactaaataaaatcctaactatttttaaaggcacaattttaaaaatccatgtttactctagttagaaatagggtttctcatttaactagttgcatacactagatattatcttatcttgagttatcatatcttgagttacattttatgtgagtatacatttcttatcacccaacagggtactaccttcatgtttctttgcattttccacagcagtttccatagcataagtatacatcagagatgggccatcggtgtttgctaatttaataaataaggtcacccattaagccatataaagatcttacttccactagggaattgaggaggcaaattgaatattgaaaaggagctttaaaaatgtcatctacttcaccataagatttcacacagcactcaaccgtatagacacaaatgtattggggaaaaattgcctgtcttctgtaaactaaaatcaaagtcataacaaaattttcttacacattttctcccaagcttgattattgcaagtaaacaattaactcaagtaaaattattagagatggtactttccaaacctttcttattacaatcccattcaagaccaaggggtataaactgaatcagaaaaagatgtaggtgtacaataaattattgttaatcatactcaccctattctgctaccaaatactagatgttattcattctattaatacaaacctgtagttttgtacccattaaccatcttcactttatcaccctttcccagctaccattcccaggctgtggtaacctttattctgttctctatctccatgagtccaatttattttttagctccaagaaatgataaatacttaaggtgatggatactcaagttaccctgttctgatcactacacattgtatgtctgtatcaaaacatcacttgtactccataaatatgtacaactattatgtacccatagcaattaaaaatatatttaaaaattacaggaagaacaaacagtacagcagtagaactataatagccagatgtatcaatgacaaacaataaaacatctgaaaacaaacaaaatagaaatgtgggcacagtgaagacaaaagcaataactgaaagtaagtggttacaatcaaaatagaaacacacagctggcaaattagttttgcagaagagtttaagttttcctatttccttggcaactgaagaaggttgtgatgttaactgcttagacatctgcatcctcagaaccatctcctcctttagaaactagaataaataccaaagtaatactacgggccagaatatactactccttaacaaaaccaaatgaaagtaatgaaataaagcttttaatatgtgaattatctttggtttaatgcctgagagggattaattattttttgttttctttgttttctttagagaaaagtgaacgtccatgtaatggcaggaatttcctgaggttgctacattctaagtgttttggaccctcgagctaatcattacaaactatccctacactcttaggagatctttattattattctttttaggttaaagttggcacttgattatagacccagtttgctcatagcctgtagaacatgggcatgaataccaagaaacagccaaaggcaagccagatttcaatcacagaagactcttatttcccacattagaataaatttaaactgacaaaggacaaaagtcaacgatataaagtcaaaactaaaaatacaaaggatttggtatacaattcaacattctagaaatgtcagttcttttacctaggttttgtgtgtgtgtgtgtgtgtgtgtgtgtgtgtgtgaatctctaaaaacagatggttatgtcttagtagtcacagtactcagtctgccatcttgccagtatgtacctgatctgatttaaaagtgcagggacttttttcccccaaatatcaagctttgttgtgataatgtcagaattattcatacttggttaggtacataggtacaggtacaggaagccacatataagaatcacccaattatttactgaatttcattttttgttgttatatgtgatataaaacttatgtgaaagaaaagatagagattaatagaataaattatctttaagggcataatgctatagctgttttttaaagagcagctcaatctcctctcctctcttctccttttctcccttttctcaccttgcctcgcttctcccatgcttctcctctcctttcctgtcctctcagaaatggagaaatggagttgagtagctatgggtaattgcaagtggttcaatgaaatataggcccttggaagctcaaagttaacaaacggaagttaataatgcttgcaaagtgtcttgaggtgaaaatgtattttcctagtcacagatataaaaagtaaataactagtatgtgttcatctgtgaaatctttggcatttaaaataaatcctcattctctgggtgggcagccttggaggagatgaaaaagttttggcaaattagacactcagatttctactcatacggtatctcaacttggcttcctcttttgcttactcctaaataaattccacacagaaggctgtttttaaaaaatcataataaataattcaggaattatatgtgccaaataatcgattgaaataattgaggtcaacaggcatgtggtttgcactcattccctaaggctgctgtgacaaattactataaacttggtggtttaaaatgacagaaatgtattcagtcacagctctggaggccagaagtcaaaatcaaggcatcagcagggctgcattccctctggagactctacggaaggatgctcccttgtcttccccagcttcttgattccttggcttgtggccacaacctctttgctccatcttcaaattgcctttcttgtgtgcctctctactcctcaatgggctacttgggaggccacttgttattgggtttaggacaaactgagataagtcaagaggttctcctcatctcaagatccttaactgcatctgcaaagactccttttccaaaaaaaggcaacatttacaggttccaagcattgaaatataaacaaagctttttggagaccatcattaaacccactagagagttcgcatttcaattccaaaaatcattttttttatttttttcttttttgagacagtttcattctgttgcccaggctgcagtgcagtggggcgatctcagctcactgcaacctcctcctccccagttcaagcgattcttgtgcctcagcttcctgagtagctgggattacaggcacatacaaccatgcctggttgatttttttgtattattagtagagatggatttcaccatgttggccaggccagtcttgaactccaaacctcaagtgatccacctgcatcagcctcccaaagtgctgggattacaggcatgagccaccacgcctggcctcaaaaggtcatttcataataaagggtctaggcttggatataaataaattatcagctattatgtaatacattcttcaaatgagatcataaagctgctaatccaattattatttattattagaactatgttggaattatactataacactgctggaagtacaagcaatgttgtataatacatgttcctaaaagaacatataagaagtgttactgaaataacaaacattttcctctaaagaattgctaggcatgaatcctgtaaactccagctaaatgaagcttaataataatagtaaattgagtgtgccatgcaccatactaagtgtttcacacattgtctggtttaatcctcatgatgacttacaagatagcataacagacttctctgaatgctgattcttccttgccataacatctcttcctttccaaaaaaaaaacatttcttattttctggtgtctggtatcttacaaaaagctgggtcttcattaagtcagtgatgataatcccaacccctttgctggtgagtggatcaggaatagacatggaacacaattgtggccaatgatacttgaagaaagctactgagggggtttctagaatgaagtttcttcacacattgtattagtttgttagaggtgccattacaaactaccacagactgggtggcttaaacggcagaaatttattttctcttagttctggaggctagaagtccaagatcaagatgttggcaatgttgatttcttctaagttctttctccttggtcttttctctttgtctatctgtcctcttctttgaaggacactggtcatattgaatgagaacctaccccagtgaccttatttaactgtaattaccagtatccccaaattaggtcacattctgaggtacatggggttagaactgatgaatttggaggtgacatgactcagcctacaacatgtttaaaaaaacacacacagaaaaaaaaaatcttcatcatttaaacattgtctctgctgggtgtgatatctaacaggaaatgaccctgtagatgacagaacagtggacagaatctagaacctttccgacatcatgagactggggcatccttgacttaggacttcctattacggatgatagttactgttcttatttttaagcagttgaggtgttttttttctctctcgcttctgctacagtatctaatttgtataagtaaatacgtttattttcattgccatttcacaaatacagaaaccttgtcaggaaagctggaattctgatccaggaatctaactcctgcctgaatgtccataaataataggtctgtggcatcaaaatgttctctccaatactcaggctttcatttcagttttataaaagcctcctagagaaaaatttaaaagcagaccttagaatattactagctggttgttctagaaatctagaagcaaggaactgtgcaaagaattaagtcagccatgaaggtattttgatgaacaagaaagtatctctactaagataaggttaaaaaacaataagaatggctacaatataaatacacaaaagtcaacagataaagaaaaagtggtatatatacactatggagtactctgcagacatcaaaaagaatgaaatcatgccttttacaggatcatggatggagctggagaccattatccttggtaaactaatgcagaaacagaaaacagagtacctcatgatatggtttggcttcgtgtcctcacccaaatctcatcttgtagctcccataattcccacatgttgtaggagggacccagtgggagatgactgagtcatgggagtggatatttcccatgcttttctcatgatagtgaatgggtctcacaagatctgatggttttaaaagtgggagtctccctgcacaagctctccttttgcctgctgccacccacgtaagacatgacttgctcttccttgccttctgccatgactatgaggcctccccagccatgtagaactgtaagtccaattatacctctttcttttgtaaatttcccagtctcaagtatgtctttatcagcagtgtgaaaacagactaatacactgcatgttctcacttagaagtagaagctaaatgatgagaactcacagacacaaagacagacacaatggatactcagccctacttgagagtggaggatgggaggaagcagaggagcagaaaaaaataaatattgggtactaggcttagcatctgggtgatgaaatgatctgtacaacaaacctccatgacacaagtttacctatataacaaacctgcacatgtaccccaaaacctgaaagttaaaagtcactaagccagttaaatgagattattgttaacaacctaatatacaaattgtgctctctctactaatctctgtagatagtttgagcccagtccttaattctctttggcaagaattgcaaattacctttagctacggatttcattgttcaattggttttaattacagcgttttccattactcatcattttccttatttcaaattaagcctctcttttacttcttcccttaagaggaaatgagtgtttgtcttttctcaaaccttcctttacatatttgtatcacatgccttttgtttgcctttctggaataaacccactgttctctcatgtccacagatgcctcatcatcccagcataaattattccaatgtttcatgtatttacttttttaaattttaaaaaatagcctgcctttcttcttctgagatgcaataatataaagaaacatggacagcctatttcttgtgcttcaaagaacatattcctaataatttgggccactattttgttccattctagtgtttttattgtgtgtggaaaaatccttcaggttaattcctcagttttactcagaactagaatgcctggcagtgtgaggtcagtgttatcaccaattctcaaccagcatcaggaaggaccacacttaacccagctgtgactgataaataactcctggcttagcagaaactgtgagcttgtgtgcgatggttaagcaatgtaataaaggaaccagctctagtggagagactctgagctccagaagactcactgaggtcagagtccctctgccttactttctagtgatatatgttttgctctattttctaatttactttggtcctatttggctttaggggtatatttttcttcagtgacttttactttgcagctgattatggcataagtactgctgcagatggcttttttggccccaattaatggcctccctttgccatgtgactttgcagctctttccaccaagacatgaagcctgtcctccaagtctttaatatagagctggctttgtacctttgtaccaatagcatctggtgaaggtggcagctaaccacttctgaaggtaggcctcaaaaagccctttgcacattttcactgtctcagaatgtcacctttgctaggagaacaaaccctagatagctttctggaagatgagagaccacatggaacagagaccaatgatctcggctgaagacaacttcaaccagttcccggctgacccaccaactgaccacagatgcaagagtgagcttaaccaagatcagctgaggttggcccagatcagcagaaccaccaacccagtcctaagttcacaaacaaaaataaattttcattgttacataccactgtgaaggaaatggctgtgctttactcagtagtagtctgaggtggctgcctggtgcagcatgacttagcagggtttggaatgcaggcgcacaactctgcttgttatataaccatgccacgtgaggtgcattaggtgatcactcatctgagctcgtacttggctcacagccactattgtctgtaaaggtgtaattactctacttaaggctgtacatacagcttgcggtttgcacctgcggctgacacccaggctcactcacgcccagagagagagtaaaagccatgtcaaaactgtgtacaattcttcgagtatttttccagctacctgccattggtctatccactcccctcagtcctcagtttgggctggaacctgacacttggcatgaaaactggcatcacgaacaggatcccaaggtgggtgagcctttggtccccgctgattcttggttggctctgtggccacaacatgggttgtggtaccagactgcagctgtgctgtgaggatgggctctggtggagactgggcggtggtaggtgggtcccttgtgagcatggagaaggccctgaagttgctggaagcacagagcactgagaaggaaggagcctttgctggcagaattggatgggcatttttgactgcgcttggagtacacacccagtccctgagggatgccacagacgtaagggctttgcagacataggcgaggcacctggaggcctggctacacagttcagaaaaagaattagaagctgccatgaatggggacctccaggcaccccctggaagcctggctacagagcttgaaaaaggaattagaggctgctgtgaatgcaggcctggaggccattggtgggaccgaggggtctgtgcagtaaagaaggggaagatgcccatgggaaaataggggaccccaaccagtaacacactcaaagatgtggatagatttgattttggccagggttgagaaacagaaaattgataagcagcccaatgaagtactcttaactttgtggagacagttgcctctggaacagcaattccagaaaatgcccaagaggaagaaggggagaaggacattgctgcgtgatctggtcccacctggggtgttccagctcaaagactatgtactgaagcaaggcagggatgtaaagccttttctgtttatgagggaactggccgaggtgcccagcttgaggggacactgggcaaccagaagccacatgtgaaattgacaagccactggtccctgcacccagataagtttccaggcaaggctgcatagacagctatgaaatgtctatggtcaatgaaagtgaaatctgtatctctgcaccttggcatcagccacctggcccctggttatgcactgtgtatgtctctcccatacctgtatacattctgggggtggacactttacacagcttgacagctgtctcatctatcacatatttgatggactacttgacaacagaattgggacagtaccactatggggtggacttgactaatgcatttttttttacagagtcaggaacaatttgccttcatgggaaggtgacaatggactttcacagtgttactgcagggctatgtgcatagccccaccatatgtcatggtcttgttaatgatattatccatggtctttttaatgctatcaagctaacctctaattctcttgcagatttagaatcggcagtgctcctcttgcctgagattgcaatggtgcagctgagaccaccttcctggcagccaagtgggctattcagcaggaataagccctgtggatagttgagcaggggctcccattcgagctggatgtgcatgtgaccacagatggtttcagctggggcctgtggcagcacacggagtgcttgagaacaccagtaggcttttgatcccaactatgaaagggagctgagctctggtattccttgatagagcagcagttagtaactgcatgtgctgcccttcaggttcatgagagcttggcaggattggttacaatcttcatgcagacaacttacccaatagcaggatgagtgcattcatggataatgaccccctggactgggatgggggagacatccactttggcaaagtggagtgcctacttggagcagcagagtacactgagcacaagtcccttagaagtcttgggagctgcagtcctatgcaagataaggccatggggcctgaggcacccctagaatttgagcctttaccatttaaagaaggacatccctccattcccaatggggcatggtacacaaatgggtttagctgaggtggtactgctgcctggaccactgttgcaatccaacctagtactgacaccatatggtttgaaaccgggtgtgggcaaagtagccaatgggctgaacttaaagcagtatggatggtgatcaccaaggaggtgacacctatagaaatgtgcactaatagctgggaagtttatcgaggcttaaccttgtggttaactacctggaagttacaaaattagctatttgttcaccggcccacgtaggccaagccatgtggcaagatctataggaggaagaatgaccttctctgaccaggtatagggatgaacagtaacctattgttgcctgtcctgatgcccctgaagtcagaagaacagaaaaattggctgtggccatggaccctccaaccccccaactgcctgtggttggccatcatagctccctgggagaagtgcctacagtatgaattgcctgtcactccttggctgttcagtgcatgccccccatggttgactgttcatagggaaacagccaggggatgaaccctcctctggggggcatatgtaatatctgtgttgcctattatgagctcccctgtgactgtggcacagacacaggacccaaagcaaccatggggaggtggaaggtgtggtattatcagccagagcagaagcccttggtaggtgcattgttatccagggatggaaagttagcctgttattgttgttgtgggttaaggattcagggatctgccctttgggcacatgtccctgcacagaggatgctttcagcctatggggtggagtgtaagggaaatggctgcatgttattttgcagtaggttgaggaagcctcccagcgcagcatgaatcagtaggtttggagtgtaagtgcacaacttcacacattatgtaaccaacactgtgtgaggcacattaggtgatcactcacatgagcttgtgcttgtctcaaagccactattgtctgtaaaaggtataattaccctgctaatgctttacatatggcttgcagctcatgcccaggcccatgcccaggcttgtgcccaggcttgtggcttgcacccatggctcatgcccaggctcgcttgtgctgagatagagtaagaaccgtgtcaaaaccgtctgtgattcctcaagtgtttttccagctccctgccacttgtccacccactgccctcggtccccagcttgggctggaacccgacacttaggatgacaagcattatggtcttgtggatgttaattagacagcattattatagcataaaaaaaaggcacaagcccatttctaataattattgtattttcctaaccagtacatatgattttttttagattatcttgttttctgttcatgatcgcttgacattctatctcttattttattaaaagttgtgacattctttgccatcctcaggagaggagctggttattttgacttccacagcaatatgcctagcagccaaccaggctgaagtgagtgtctaaataagactatttaatggataattttcaggtttctcagatgcaccacatttgctctatccactctgtttttcctaaccttatcagatttcattctgtcacagtcctaatccatgaaatcattgtaaatactgtctaccctttgacctcatttgattagtagaaaacatgctgtcaccaagccaagctttgatctaagggatctttcttaaagcaatgagaataatcactattccagtaacagcaacagttgttgaacaaacaagatttacctggggatttgaagcaagggcaaatttttcctctcagtttttttttcaaataaataaattaatagaagggcaaaagcaacaggaactaaaagtatagattcctgtactacctagttattgtttttttctaaatttgaaagtcttattcacaagataaacagccacgtctatttttgaaattttttatggaggcaaaaaattcaaggtgctagattgtcctgctttgacaactaaaaagcggggggaaatccctgtcatttacaatggatgcaggttaattgtctgaaagactggcatataaaagaccagtttatttagctaaggtatgcaggtcatttgaatagcacaattagcaaaggtgagctgggggagtatgaaggaaattcaaggaatcttcatttctgacaacttggtgaaggatatctgacctaataccatagtgtataggtgatggatttctatgaaattgtagttagtgtgggaagagcataaaaagtgtatagccagaagacagaagccaaaagcaaagaactaggtgcaggacggatgatgggttaaaatgaaaaaacaaaactgaagacaaagagaagccaagagatttcagaatgcaaagacaaaatgggggtaaggaaaggaaagagaagatcacacagtctatagaccattaccaagtgagactatccaaagccatgaaagacaggcataggcatatacctgagtttcaggagtacctctaagagactcagccaatgtcatcccattttctgaaagcaggaaaaaaaataaataagccgctgaaaattagattttcttaacaaatggctgaggataaatagtgcataggtacatgagatatatactaaaattaaaatgtaaaaaaaaatttagacatttagggaagaagccatcttttttgagaagtacaccagtttaataaactctaagctcttctgtttgctgatagtcctctgggctatggaaatactctggttatgggactattgcagctatgagaatagtacaagatgaagcttcctgttatcgagcttcacaggtaatctgtgtcctctgacattcctgactgttgctcactacacaagagccaagaaagcagggttgaatctcatcaccacagcatgtgtctattgctatttcatagtcccctcttccatctgctaaagatggaacatgatctatcttgctcactctaattttttttttgccttaaaaactgggccatgagttagaggcatgaatagaaaccatctctcaactccaggaggctttgcaaattacagactatgaagtacttgacatatagtttctaaatacagttaatcaaagttataaaacctaagaaataaataaactcaagatttgaaaatctatttgaaaagtatatagctatagtcctatcccatgatagagttcatttacttcatctctttccttttccaccagaaaaaaactaagtattaaacatagaagtttcagaaaccttcttacaaaactgtcataaaagaacatcatatttcatgcatatgggatcatgcttagatcgaacacaaaactaagaccataattttttgagaaaatttataattagattttatcaaattcaagttgttaagtattgttcttttcttactgacattgtgcataaatggcttgagatcagagtttgcattatttttcattttgtgaaaattatcttgttatattggtaatatcatttaaaaatcttttttattcacagtagttctctaatctctttaaaaatatattatttctttttataagaactcatctgtgattatgggagttaaaaactttaagcttttaaaaaatgcccttgtttgttcagagcccttctgtttcttactcagaatttgacttctatataataaagagaaaactaaaattttactccaatattaagtttcctacttggttcagacaaactaccactggatgacacacatacttgttggagtggacaataaatcatcccatctacaataatgagatgatatctgatatggtttggctatgtccccacccaaatctcatcttgaattcccacatgttgtgggagggaccaggtgggagataattgaatcatgggggcaggtctctcccatgctgttctcaggatagtgaataagacttatgagatctgatgattatataaaggggagtttccctgcacaagctctcttctcttgtctgccaccacatgagatgtgcctttcaccttccaccatgactgtgacgtgtccccaacacatggaactttaagtccattaaaccttttatcttcccagtcttgggtatgtctttatcagcagcatgaaaatagactactacaatgtcttagaatctgatatggtttgactctgtccccacccaaatctcatcttgaattgtagctcccagaattcccatgtgtcatgggagggaccctgtgggaggtaattgaatcatggggttgggtctttcccatgctgttctcatgatattgaatcagtctcaggagatctgatagttttataaatgagagatcccctacacaagctctcttgcctgctgccatgtaagaggtgactttgctcctcatttgccttgattgtgaggcctccctagacatgtggaactgtgagacaattaaacaactttcctttataaactacccagtgtcaggtatgtctttattagcagtgtgagaacagactaatacagaatcctattatatttaaaatttgctttagaatatgctaaaaagatatatatgtgatgggctaccaaatattatctgtacaatgatttatttctccctttgcagcaaaagtttaagcaccagaaaactaaaaactctgaagcacagcattcaaataaaataatctcaggcaattcaggtttctgtggggtcctccacaaagccaaaaatctttcaacagtgctgtggtctgaggacagacatgtttcgcttaatacctttgtggttaatatgacttttaataaaattctccaaaattatttctccagaattaggtaatataaataaaagaggcaaaggctgggttgcaagttgaccattacatcattcatttcaccattgttacacaaatatttcttgacctcatttatttcatagaatgtacaagtgaatttttgtaacatgtaggttacatttcaccaatctattaaacaagtaaatattcatatttgaatgtatgattgtgctaagaaggggaaaactgcataattttctaaattcagaagaaagtaaaactaacattaaaagaaaagtatttaaaactaacattaaatgtaagatatttatctgaaatatttcaaatggattaaaaattacataataaatagcataccatatatttcaatttggctgtatttaaaaaaaagagaacccaaaataactttcaaatttttaaattaaaaaaattatatttggaatattctggagagaggtatacttctctaaatgccttagtaattcttgtttgtgtaaccaagagataagagaaaatctaaacaaactccactcagattttacagtaaaagcctgattgtatagctgtttgtttattgagataggtgggtgatagattggtgataggtagctatatagataaagaggataagtcatcttaaaacctgataaataccatgaacttaatccctataaaccaataaattatacaatatatgtcttcaaaatagaaatttaaccttatctgacccacttatgagcaaaattttctggagccctccactgagttgcttcatctccatacttttcttgtagctactaaataaactaaagtattttaacttctgttgttcaacagggaataattaatctgagatccttgaggctattccactcagccctctaaacatacctgtggcacataaaatggccacgaccaaagataaagaccatgggcttcttcctcttgtttctctcttaacctaaagaagcaaagacacacctactcatgccatatttgaccctttgttagctcattctcctaagcagagcagtcactggtcagattaaaagagccaggatgaccatttggacctgattttactgggaggggagaggggcaaagaagggagttgctgttccctaaaatgaggaacccctcagccttcgcattttcctcttgagtcccacaaaggagcagcaactttacccacaacgttagtgagaggaggcctagctattcttcttcttattctgtaccaatcctccacatatttccacattagaaaatattcctagcatttctgggcaggctgagactctcctcttgggctcctagctattcgcacaatagaacatactggcaacctcttactcacagtttataatacaattcacaaaaaagcccaccatgttattattgcataaatttcttacaaaagctaaacaatatttttacttctacttggttaaactattttacctgcatctacactgtaatattttaaatatcttaagttacatttcattactttttatcacagcacctatgtaactcagaataactgttggaaatacgaagtatagtttccttcttaatccccaaaactcaccccaccttttctgcaggttctgaatcaaagagtgccgtttggaccgaaaggcctgtgccaggcttccacaccatctgcttcttaatgtaaaatagctcagctgcagagcagagtgagcttgacgtaaccacagcatctgagggcccacggcctctgagacagtgagaatagcacaaagaggtcaagcaaagtgtcaaggctgacaccgaaagagcctcatttttttttctagataaaaatcacggccaggcgcggtggctcacgcctgtaatcccagcactttgggaggccgaggtgggcggatcatgaggtcaggagatccagaccaccctggctaacacggtgaaaccccgtctctactaaaaaatacaaaaaattagccgggcatggcggtggcgggcgcctgtagtcccagctactggggcggctgaggcaggagaatggcgtcagcccgggaggcggagcttgcagtgagccgagatcgtgctaccgcactccagcctgggctacagagcgagactccgtccaaaaaaaaataaaaaataaaaataaataaaagttaaaaataaaaataaatcacaaccataggttgccaaattaatatttttaaaaaagattaaaaattttagttgcttattaagacagcatagatggtgagtgaactaattatttagattattttgccaagttacagccagttacagatgaagaaacagctcctgtttttagataaacctcaccctcagagtgtaaaatatttatatgagcatgatacagaatatcatgagtcattttacgtttataaaggaaaatgccaactcatttccaatgccagcaactttttctaaaggttaggattgtctctaaccaattacaaaaaactaataagccaagctcagatagagaaagaccacagtatctcacttatgtggaatatttaaaaagtagaattcacagaaacagagagtaaagtggttgccagaggctgggggctagaggagctgggaaagtgttggtcaaagcacatggaatttcagttagatgggataaataagttcaagaaatctattgtacatcatagggattacagttaataacagtacatcgtatacgtaaaaattcctgagagtagattttaagtattctcaccacaacaaaataagtatgtgagacaatgcatgtgtgaaatatcttcacttagcccttccattatgcatacatatatcaaaaaaatcatgttgtatgccatcaatatatattattttacttgtcagtttgaaaaatcaattttaaaagctaattattcaggacaaacacttttttttttagaataattacgttgggagatcaccatgccatcttttagaagcagtttaaatctcagtggaaaacaaaagtacttattagatatatccttgtagcacaccatgcttgcatacaacttagaggaacatcattgctcaggctgtctaaataaatgacacatagaaaagggataaagttaggatatagaaatatacagaaaagcagaggccgatggggaggtggggtcaggcttaagggtttgcaactaatttttatgaatacaaaaattttggacagaaacaaattcatgtttctttcttaaatatcaagagaaaaggagtatctgtttgttatttttctctcaaaacatattttttacagtctgtaatagttttggtatgagagccatcttacataatttaaataaatttaaattaaatcttttttaaaaaatgggaacaaagagagaacaaaagggcagtcatttcttagagaaatcttggtttattttgcattattatttttccagaaaaattattaataaaatatgcaatatggaaaatagtgataaatcagatcaataaatcaagatgcatcaagattccactggtactagactctgtgtgggtgtagtgcactggaaaggtggaattatggaacattttttaaaagcaactgtccacgtgtaattattacaattaatgggtaaagaaataggcacgagaaaaagtgaggcatagtgtgagataaaggagatgaggaatcccaagaatgtcaccagagacagattttgctttttaaatattaaacatggaaaaattcattcttagattgccccatttagatggtcatattagtttcctattgctgggggtaccaaccactgcaaacttggtggcttaaaacaatagacatttattaccttgtagttctagaagtcagaagttcaaaatgggtttcactggactaaaaccaagatgttatcagggctggttcctttcaaaggctctaagggagaatttgttcccattcttttcccagcttctaaaagttacctgcattccttaaatagttcatttgaccttcattccttgaagatcttcatcaaagccagcagcatagcatcttccagtctctttcagactcggaccctcttgcctctctcttataacagccttgtgattgcactgggctcacgtggataatccaagataatctttccatctcaagatccttaacttaatcacatctgcaaaatcccttttgccatgcaaggtaacatatttacaagtataggggattagctcatggacacctttgggagggaggggcattaatctcctatcacaattgtggactcgcattttgctttggttaaaatactctcccaatttggaagctactgagcatgttgatgctaaaattaatattccaacctctaggcaaaatatttctcaactgcatggaaagggctcacatggatgatgtattttattttggacacttggttgcagtctaaatgaaattaagttgaaagtggtagccactctgtggctgagatgtgattaaaggagtgagataagacaaacacagaagaatcctgtacacacaaaaatagattcagccacagcaagccctgctggcatggtgaaaagacaatctatacatagactaaatgtaaaatgaaaattcacacagaagtagtagctatcatgtgtacttgacctctcaggtgaaatagaagaattaatataaatcacacaagacatttaaaagtgtattcagtcaaaacttacatgggtttaggaaattattttgtaatgtgaatgagtgatatcccaaagtatgttctcaccccaatgtccaggaattgtggattttatttgaatatggatatccgtggcatacatccaagcaaatggaaactctctggaagaaataaaactagacatttctgtccctcttatcatagcaaagaacttctgctctaaacaaaagccctgataattcttttcaaatatctgcattagacatgataacagtctatacaaacaatgaattaattgtaagatctgcatgcaaggataggaatattttattctaaacttggctaagccactttggtagaggtaggtcactgtcttcgttacctattgctacataacaaattgcccccaaaacttagtggcttaaatcaacaaacatttttatctcacggtttctatggattaagaatatggaagcaacctagctaggtagcatctcatgactctgcaatcaagatgtcagctagagcagctgcagtcatgtcaaggctcatgtgacaaagggtccacttccgagctcactcagttgttgggagaactcagaagatttgcttctgacctctttcctgggcttctcagcatgactgtcccatgacgtggacactgactttctccaaagagaaccatgcaagagatggcaaaagcacattcatgatggaagccacaggttttttttaataacttaatctcagaagtgacacccatcactgctaccacattctacagtttattcttgaacaatatgagtttgaactgcatggattcacttatacatggattttctcctgcctctatcacccctaagacaagaagaccaaatcttccttttcattctcctcctcagcctactcaatgtgaagatgacaaggatgaagacctttatgatgctccacttccacttaataaatagtaaatatatgttttcttccttgtgattttcttagcattttcttttctgtaacttactttattgtaagaatacggtatataatacatattacatacaaacaagcgctaaccgactgtttatgttatgagtaaggcttccactcaacagtaggctgtagtagttaactgttggggaagttaaaaattatacaaagatggccaggtgcggtggctcaacacctgtaatcccagcactttgggaggccaaggcgggcagatcacgaggtcaggagatcgagaccatcctggctaacatggtgaaacccgtctctagtaaaaatacaaaaaaaaaaaaattagccgggcatggtggcgggcgcctgtagtcccaactaccggtggctgaggcaggagaatagctgaacctggagggcagagcttgcagtgagccaagaacgcaccactgcactccagcctgggcaacagagcaagactctgtctcaaaaaaaaaaaaaaaatatatatatatatatatatacaaagattttttgactgtgcaggggatcaacacctctaactcccatgttgttcaagggtcaattctatttattagtagtgaggtaatgtattagtccatttccttgctgctaataaagacatacccaagactgggtagtttatacagtaaaagaagtttaatggactcacagttctgtgtggcttgggaggcctcacaatcatggcagaaggcaaaaggcacatcttacagggaagggagaatgagaaccaagtgaaagggcaaatcccttgtaaaatcatcagatcttgtgaggcttatttactaccacaagaatagtatgggagaaaagcccccatgattcaattatctcccactgggtccctcccatgacaggttggaattatgggagctgcaatttaagatgagatttgggtggggacacagccaaaccatatcaggtaacataccctagcccatattcaacaagtaggaattctacaaagtcacaaacaccaggaggtaggaaatgtcacagaccacctcagagactgcctgctgtagtcacctgggaaaactctcctcctaaattaactttcctaaggaagtcatcgtgcttatactttggtattggatcattttaaagctaatttcctaaagactaatgtgtatgtctataaaaggtaaacaaagccagacactacagtggtaaagacaaatttgtaatcagtaatatactattgccgcacagaagagtgtccagtgtaggctgaactcaactttgatttgtgcagaggtaactgagcattttaaagggagaatgggaaggttgacaaggggtctagtagcctatcagtagagtcagaagtgaaaaattactgagacttggtcactaaatgtcaattaaaccagctgtatctgttggctgcaaattgcccaagttagaattctctcctgtcacagagactgggagtcagagaccctttcctcttcctaattgttacatattaaaggaatggctttcaagtccttgaaaaacacacttctgtgttgtaggagatacatatacatctcaaagggatggatgaaagattcacaatcatgaacagtttttagaaaatgcttgaaaagaattgtcagagctctataatcaggtgttggctatgacagtcaattcttttggcagccttgaactttctcaggtaggctctgtaaggggactgggatcatcctagagatgcaaccttgaaatgttagaaactatgctagtgtttgtttcagccttttaatgccagaggatgggacagacagacaaaatcatctatgctgagagtttttataggccaagatcaagagtttttatagccaagaggaaggcccaatggagactacctagagtttggtcaaaggaataatctttgtcatgtccatattatgacactttaagcccattcattctctattgggcctcagttaccaagtgcattaatatgcaagttcagtggtacctgagtcagtactggtgaagacaggcatccgttcatgctactcggttctccacctgtgactggaattcctcagctaatttatcaccttcttccttgctcgtgggttggctgatcatgggccttgtcgactgttggtcccccaaatgtagaatcaatctgtctgccagcttggctagatgtagaagccagctggctatgctgactattctcaggaccagggagaacccaaagaacagcccctccaggacagccagccaggccccagcaaaccagccagaaatttctgaaaacttccagagctggtcagctatgcttgacatctgtgttccagagccggggaccctcattccaaactcacagggccaactcttgctataatatgtagcttttattttccatttgcactcttcttctgatatttttgcatgttcagggctggtcaatcttagtagaaagaaacactttgttatgttcaaacttttcaagcagacattgttcagtgcattttccaaaccagaaggtactaattaaaagcacttcggtaagattctggattttccagtactcagttccccaaactgaatgggaacacatacaggaaaacattcatttattaaaaagttgaagtactatgtgatagaatgaaatgtagtggaatcaccaatagcaggtctattatctttgatgtcaatatttctaatattttccataacatgtatcacaaatagctgagtcttttcttttaaatatcacaaatatcacaaatagctgagtcttttttattttaagcccttccagtgcttatagtaagtagtctttttagaaaaaaatcaagttttcagtgacttttataaactttgggacaaaatggttatgcaatgtaacaataataccaatgttgaagcactgtcttttaaaaaaatatttcattgataaataaaagttgtgtatattcaaagtgcacagcgtgatgacttgacatattgtatatattgtgtactgactaccactattaaaataattaacacatccatcacaacctatagttatcgcttgtatgtgtagcagggtggaggaggggataagacacttgaaatctgctcttttagcaaatttctttctttgtcttttttttttttttttttttttttttgagatggagttttgctctgttgcccaggctggagtgcagtggcgtgatctccgatcactgcaacctccacctcccaggttcaagcgattcagcctcctgagtagctgggattacaggtgcccatcaccatgcccagctaattttagtatttttagtagagatggggtttcaccatgttagttagatttgtcttgaactcctgacctcaggtgatgcacccaactcggcctcccaaagtgctgggattacaggcatgagccaccgcataatattgttaactacagtcaccatgctgtactttagacccccagaatgcatacatcttaagactggaaatttgtattctttgaccaatatctcctcatttctctacaccccagcccatggaaaccatcattctactcttgaagcactgtatattaaatgtcacctgaggcctgtttccagttatctccgagcttcaatttacttgtctttgaatttatgttaatgttccccttctctctctgggttgatgtgagaagggaaatgaaatcacatacatgaaagctcctagcacaatgtctgttctataataaatgtaaaattaatatttgtttttctggttggaaggttataattttttaaattatagatgtttcttcagaaggaatagaagaaaaaatgttaggtctttgcatgtcttaatctacaaactgtcaccccaagacagctttgtactcaaaatgtgaatttagtccctttagatgatgagttgaggggagggtgagttgtttgtttttgatcccttgttgaatggatagtcaacctaaaaccacagttcttacttgagtgtctcccatagacactagcagaaaataattattttatgccttcactgtgataagatttgatatctcttttatgagagatcttaaatgcctatattttctggaggccgttaatccgttttattctttttctgttgcaacagactgatgttggcagtaaaaacaatgaaagaggggaaggttttcgactaattaaatatgttggatgcttactatatattcacaacatggtcttaaatgaaatgggcaataatatatttggattaaaaagaaaagagaagcaaaaataatttagagagttgaacagaagtgcgctagaggaaatgccaaatacacgttcagggactgagattaggcaattcaggctgaaacacatggattatgtataagagtaaatgacaacatgcttcctcatttagctatcaactgtcatctcactggccattcacttccaggcaagagctctgccagatttctcaaatgaattttctacacccattacatctgtttcctctccacctactttcccctttaccccatgtaatttgctttccatttccaacaatgtgccaagtgcatgcttgcaaagttcactaatgactatattattgccaaaacaggtgaccttctctcttcttttgtcttttattctacaggacatcttcagtgcatttgacactttctcttaacattttttcttacctacagtcttaatcttttgccttagtttctctatgttttctaaccatttctagttatttttcctcattttcttccccagaaacatctctgtgcattactcaactcaaaaggtctgttcctcaaaccctatctccatatattttctgccctggaatgcagccatactccaagccttgactatcccttatcaaatgtcgcttttctatgctgctggcccattttcacaggaatgtgcagcgccctcacattaaccctgcatgttctatccccaccatctcttctcctctcaaatgtgacagtcttctcacatgcaccagccaccctcaaccatctagcctatgtgcagttcccatagttaataaaaaatctgctagttaattcatgttctctcacattgcacagactttttgcatatacttccctccacctggaatgaccttcctatcctgtgagactttttaatatctgccagtcttccaagactctgctaaagtccttaataagtatttcctacctccctattttaaggcaaatgctcctcttccttctgttttaagagttgattttggaggtttagtctcctgtttctttcaggttgtgaatactttaaaaagacagtcactatttatctctttcctctgcttccaatgcccagcataatttgtaacccaccacacttaatcaaaacctccttgttcaatgaaaacatgaataaagcaagccaggcagttgccaggtctgcctctctggtgagttctctagtcttaggtgtgtaactgattccttggcatgtccatctccactcatctcaaatccagtactttcaatacttgaaacaatacctcagtttacaatggagatctcccaatttaaagcttattctctaagaatttcccattgaaaccaggattttctcctctgttagactgtaagcttcttacgtgactattgcatttcccctagaactaaataattcttaacccatgtatgtgcataagtttggactaaatgaaaggttaaatagtaaatacaaatactggaaatgtaacttggagccagttggtaggaaactaaaaccaaatgttggctctgcctagaagactttctacttggtctttgtcaaaatccttctccagtgtcaattcctccgttaaactcttcctcaggttccacttcgcagatggtacttgggagatctgttattacagtggttttgaatgtgcttttgcccactccttccccccaccatctcccaacagtaaggtagctgaggtcacaacttcctattgcttttagaaaaataccttgcccagactggacatttgtagctatttggctgaactgaggcaccaagagctgggacccacagacttcatcagaggtgttaagagttcaagagaagtgatcgggtacgcagagagctagtcagcaatagagaagccccaaaaagctgacagcttatttcacaagtctttgcccctttcagaaaaggaaaagacagctctggaatgttctaagtgaccatttcttttcacaggaaccctcaccattatccactccaaaagggccagataaaaagctggactctgccaagcaccctcaaatccagttacatgactaaaccgttaaacagacatcctgattcaaaggcccggggtaacttgccctagcatttcctatgagaacatgtctgtttaataacaatgtaataacagataataaggacaccaatcacagagagagctggttcggcccaagttaaaagttgatgataattactagactaaacaaattattaaaaatatgtctctatcttcaatctgaatttttaaatacttaagaataacttgggaactgaggttcaatttagtaagcatcattataactaataccaaatggtttagctacaattgtactttgaaaagttttgggaattttattttattttttttttggcatgtcagggcagatgaaatttcaaaagaatacatacttcattccttctgaagtgacccttaattatttggggaggaaaatgagatgaagcctatgtgtcaacatatgctagacacccttagtctgtacatatgtggacacatttcagacatcataggtggaaaatgattttaaatgttttaaagtactttttcatttgagaagcaagggtaaccaaatatttactgtcaaaagaaaaagaaaattgacctactcctcttcttcatatctaaaaatatgttcattatgaacacatttgggttctctactatagggaacaaatttcctagatctgagtaacagtaatttgtattaaatctgtccatcaaagaaatcggtattccaactcccctaaaaggtggtggggagtaaaattaaatacaaaagttttcaaaaaattgggtggtattttttatcatcaaagagctatgaaataactttttttcattaagaatatttcactttgagacttttatttctgccctttccataacatgtataatgtttttcctaatgtcatttttcctggccgagaagcacgttaacaaaaatagagattttttttttaagtggaggtggagagaacaggagtgttatgtcacaagtgacttcaaatggaagaaaaataccaattccacattttattctgaagagagaatggaaatttaaagataatgttcactaactttccctgtgtgcccatagtcaaccaaagatttctgtgtctgcttaacccagcattgatccaactaataaattgttcctttatagaaaataatctctgtcccaacacaagaggaagcagtgtgaattctttatttttagctaggctgcatatcatgaatccttgccatgttgaggaattgtgctactgattctttctactaaagaccatttggggcatttgaattaagtaacctgctcttcatgctgactaatacggatagattcttaccattttccagtacttcatgtaaatatttccaactcctatcaaataaaactagtatttcttgactcttttaatatacttcaagaagcttttatgtttgttttggaatgttttaattttcactttattgatttttagctaaaatgttacccttttactctacaagttaattttgagtggagtgagaaaaacccatgtttcaaaaccagatgagattatccctgtgtgatgttgcacttatgcactctttgcagttagcaaatataaataaaatgcacaggaatagcgttcatggcatttttcttttttttttttttttctttttttttttttgagacggagtctcgctctgtcgcccaggctggagtgcagtggtgcgatctcggctcactgcaagctccgcctcccgggttcatgccattctcctgcctcagcctcccgagtagctgggactacaggcgcccgctaccacgcccggctaattttttttttttgtatttttagtagagacggggtttcaccgtgttagccaggatggtctcgatctcctgacctcgtgatccgcccgcctaggcctcccaaagtgctgggattacaggcgtgagccaccgtgcccggccagcatttttcagatataccataggagtggcaagtggctgcataagaaacaaaaatatacaaatggctaacaggcatataaaaaggtgcccaacatcattgatcatcagagaaatgcaagtcaaaagtacaatgaagtatcatctcaccccagtaaaaatggtttttatccaaaagacaggcaataatgactgctggtgaggatgtggatagaagggaaccctcaaatactgttgatgttcccatggagctactatggagaacagtttgtagcttctttaagaaactaaaaatagaacaaccctactgctaggtatatacccccaaaaaaggaaatcagtatatcgaagatatacctgcactcgtatgggtttcatttgtttgtttgagatggggtttcactcccatagcccaggttgaagtgcagtggtgtgatctcagctcactgcagactcaactacccagactcaggtgaccctcccacctcagcctcctgagtagctgggactacaggctggcactaccacacttagctaatattttatatttttagtagagatgaaggcttaccacattacctaagttggtcttgaactcctgggctcaagcaatctgcctgccttggcctcccaaagtgctaggattacaggccagagccacaacacccagcctcctatgtttattacagcactgttcacaatagccaagatttggaagcaacctaagtgtccataagcagatgaacggataaagaaaatgtggtatgtatacccagtggagtattattcagccacaaataagaatgagatcctgtcatttacaacaatatggatgaaactggaggtcattatgttaaacgaaataagctaggcacagaaacacaaacttggtatgttctctttcatttgtgggagttaaaaattaaaagaattgaactcatggagatagagagtagaatgatggttatcagaggctattaagggttgtggtggagaggaaagagaatggttaatgtggacaaaaacataggtggaatgaataagatgtagtatttgatagcacaatagggtgactataatgaataataacttattatacattttaaaataactaaagaataaaattggattgtttgtaccaaaaagaaaaatgatgcttgaggtaatgaatatttcatttgccctgatgtgattactatgaattgtacgcctatatcaaaatatcttatgtaccccataaatatatacacctactatgtacccacaaaaattaaaaattaaaaaaagaaatcaaaattaatgcctttgataagtagagaaattttcaaaccgattgacacataactactgtccaataaatgttcgatgttattataatttgtcaccgcatccactttcaacacctgcgacctcagtgttttcataatctggttatatccgcatattcatttccagttaccaaataaaattccaaaactcagacctagtgcggtcagtcccacaatgccataagccacctatcttctgtttgcgcttttcccaaataagaattttaaagtatgcactgacaatcaatatcaatacatatattattagtgtaagaattaataatgatgcacgaaatactttgatccgctgagggagagaagttatacaagattttatcaatttccagtggcatcatgtgcttctctcgctcaggttgtggccttgatataagtagctctcccttcactggcttcaatcactttttgttctgaaagtatttattcccattgctagtgttactacagcacccacaataggagatacacaataaatgatccagaaaatagtttctctcctaaacaatcacttgtaactcctggtaacattggccataaaataaactctcccaatcccacatgcccaggggctgaaagaattcagggtgggccagatggaaattatatcctgaacctacaagaaattaaatatgctcagcctctccagtttccctgtttttttttgttttttttttttttggtttacatgggaacctgtgtttgtaatggagttttgtgttaaccagctgcagacagagtccttattgcctgtgccttcccagtgccacagaactccttttcctaacatttattcaagtcatggtttatggtttcatatgctttttaattgattttagtctttccctaccagaggcaatgtttgggtgctttgtttgttttattggttggttggttggtttgggtttgggtttacttgctagttttgcccacattttatccccactgtatctaacaatgtcctagggtctgataggctttttaaaaatatctggttgactgactacttaatcaagttctcatgttctctaagggtttctaagatgacatgctttctcaatattcatttgccctcttctttcctttccctgatgcctatgccttacagaacaaatggccttgttgggtttaacatatttctaaaaactggattaatcaatacacctccatttacagcaaccacctccagcactatgatcaccataatctttgtctttttgttagagaaaccctatcccttctattttttctcctgctacatggtttaaatttcttatgtgttatcactgaccttgtgctatggatggaactatgtgggcaaaatcactctttggctttctacataacaattttttcagggttgttttctctttcctatgagggaaagtttatgctatctctaaaatattgcaaaggttgtcccagtcttcctcttacctggctgtgtttctggccaaagttgagaaaatggagaagaaagctcatggcccctcaagtagcctaccatacagcggagagcacctgtgtggacaaaaattacaatgtgatgagagagacgctgtcatggagatctgtatgaagtgctgtgagataacaagagaaacatccagatttacccccccccccccacacacacacacaaactcaagggagaagtcataggaaaaaaagaactttaaaatggcaactggagtcataagtatgcatttgctgggcatagacattctacgtagagaaagcagactgtaagcaatagagggggcagcctgcccagctgatatgagtaattcagtgttgtgtgtgtgtgtgtgtgtgtgtgtgtgtgtgtgtgtgcgcgcgcgcaggtgtgcaggtgtttatgaaggagtgtttatgaaggtgttaggagattaaatattgaaagatgagtatagacaggttagcatagttcaactaaatatcttttactctatcctgtgggcaatcagaggctgttttatatttactggtgagaaagatttctggcataaagcagagaactgaccggtgaagaatgatattaaaagcagagagaattatacagcacttgaagcaagagatggcatgcattgatgagctgatgctacaacagagtcagtggagaagatatctggaggcatgttaacagacttgatgatggtttgagtgggtgctggatgtaaggtgagcggaggcatcttggataatgtctaggatcacagagaggacggcagaggagtaaattggaggagaatatgagtttagtagtgaaacaacaggtgaagatatccaggtggaatcaatgtttttatttgaaaagcaatggaagaatctggttggaggaataaatttgaaattcatcagcaactgagcgcagatgaaggcaagtaagaaaatgaaattacccttgcagagtagcaagacaaaagaaataagtttatgtttgtttcgttctgagctacaatgtaaacaaggctgctttacaacggctttatttatttttactttcatgcaattttttacacatcttttggagggtaaacttcaccatatccattaataatccttggttatttaaaatggaaaaaaaagaatgaaattctggtgaatctccatctgtaaggtatagatggaggaagcagagctacaaagtacactgagaattaattggccagagaaatagaaaagaattcatgtaaaaatgaaagttggagcataaagtggtaaacaatataaaatgtcataaagagggtcaggtaaaaagaggaacaattttctttttggttataacaccttgaagggcttcgatgatggttgctagaaaaattttaacagattagtgctgtgtgaggccaaagtgcaatgattattaatgtcaacagaggagaaggaatagagacatctaaacagtagctccatgaggtttcatcttaaagacgaataaagaaaactcaagaccgaagataacatcaatcaagagtaaaaagtagaagatacacaaagaaagaataatttttggaccaagttcttcaaagaggtgaagagaagtgtgaggtagaacacagaacgatagcatgaacttgaatagtgatggatacatctctgctaaggcagagtgaaaaaaggggcatgagaagatgagtgtgaggaagaaaagccagaaagttaacatttgcttccaatagcctttattctctggtgaaagcaaacacagagctagacagggagatggagtgccgacggcttcaataaccacgtgaggaattatagatggggggatgagagaatgactaaggctccaaagagaaccgttttgagttcacagctagtgacagcagatgaccctaatgcagtgtgttaaatctgttctccagaggtatgaacttcaggctggcattgggccagaagaagatgattgctggctctgtcctgtgaaggaggtgtgggtaggaggattttcacagcggatgcacttgaacaggtaagggatgggaatcccaatggttagaagaaacaatacagaaataggaggttctaaggcatgtctggaagtgtcttatttcttatatctttacttttgccacagtgatgggattctccttatcaaggcccagcttttctattgatgtcatgcagagagcaagccatgtagttcttgcttccaggaaatatttttttctgggaaagtatggaaggaatctgtgtgctctgtgagctgccctggcctgaccacacagctggctctgtcaaaaaccaagaggattttcagatgtttccctaaggcaaagatacatattgtgtatatccagcagtttatttatctaataaaataatcacacatagttctcctactatgggccgtaactctttgagcactttgtaaatatcaattaatttaacccccagaactgcccaccaaggtgagtattgtcattatccccatttcacagatagggaagctgaagtctagagaagttaggtgtggtgtctacagactcaaagtgggtaagacacagggagggatttgaacctagacagtccagctctggagtctggattcttatccactattccaagctgtctttttataatcaaatagttaaaagttgtaaaattctgtgtggtgggaattttctaactactccaatttcttcctattacactatcaccaaacatttaattagaattggcaacttaataatttcaattttgttatcttctttaaagacataaaggtgcagcataaaggtgagcatttttattttaatgtcatagaatgttttttccttcaccatgaaatatccacatctttgatttccatgagtcatagaacattcgtggattccctggacatcagccctattttaactccctttgtttccagagcaggtgtctacacagttggtcatggtgacctctgtttgttctgggagcctttttgaattattagaaggtagtctactattagccagtattccacttggcaaagccaaacacgtgtcaagcctgcttggagatatatatatatataaaatttgattttccttattcttagccagttatacatctgtgtatatattattaattgttataagtttaatttttccattgtcctatatatacgtatttgtgtctggaaattattatcttctgtttaaaattcaaacacattgtttctttagttaatagattactctgtcttcacagagatgttggtttgattttctagagaaaaagttctgggattttgaatgttttgtattttgaacactgagccaaactctgaccacatttttttaatggaaacacttctgatgaaaagataaagcattatgttaacctgtagtctttggagttgaagtctaaacagaagtataatgcgtgaattgactgattatttcccgcttctgagttagctggctttttactgttagctgtaagagtcacagggctcacaaaattctgtctccccctaaccaatgagtaagaaatgatgagttgtttaatataatacaaatcaaattatagaatgttgccaaaagaatgacaacggcagtttgataatggagcaattaaagtttaattaagaaaaatacatttttgatttggcagataattgagataatatcttctactatgatgttggaaaaaatataaaagaataattaaaaatttttaagtggaaatgaagagtagaaaataaaatctctaagcacaaaacattcttagtttcctcagtgcagtagaaaggccagcttgcctgaagcaaaatgtacaaaagtagttctgaatcccagcattcatagcagatctgtgacttatactttcgatagcattgttcaggaaaaatccatgaccccagaatataggtgagaatctcattagtaatgattaatgatttacatgagtacagtaatttaccttttgcaaagttatttattcatttaactaaaaattatctgttgatcatttactatgtgcacagcactgtgttagataatagagcaacaagatctttactcccactgagtttccatctacccaggaagatgaagcatgacatgtcatttcaaatgtgattatgtgtattatgaaaggctaagtacaaattgctatggcagcaaatgctacgcgggacttaggacacatagactctgtctacatgcttataaaagatggtttttaaaatgttagtgtgcttaaaagctctatacccgtctaattgtagctatacattacagcattcatcacattctatgtgtatgtatacctattccgccaaacattgttcttaactctgattacataataagtggtctgcagggaagcccaagcaaaaatatatttttaaaagagcttcccaggtaattctaccacacagccatgatcaagaaccacaacacgaggccacgagcttcttaaggacagagatacctgttgtcctgaactttatgcctaacatctggcatggtaagctatacagatttggtgtacaataaacgcttgtacattgaactgaattgatttgaaatgccctggaaatgcattataaactgcttcctcaagagagaaagtctcaatattgcatgtccttctttcatttctactctagaaatgtaacataaacatgatgaaacagccataccaatccggtgagttatctgcctgttccctcagggggacaaaaaaattaaaagcatattattaaataactataaaaaatttggattaggaaatatcctaattcacccatggcctgtctagtccactcagttctcaatgcacatgccaactattgctaaaaccatctgttcccttccagacatggatgatcccatcaaacaaccatgagccaaatttgctaaccatcagcctgcaaaaagtacacagagtttgacttttcacctgaccaatcctatcagcacttcgtgccagtcataaagacaaaaaaatccaaccagctgcactctgtgaatggctgaactgattgaactgcctagatattttggtcaggaagacacaatctaaggcttccccatcaacacaaatttccatggaaaccaaacctggagatagagtacatgtactttattttaggtccaatggttgtcatgaggccttccctgtgtcagtcaaggttcttggtatccaggccagtgctttgctccatggctggctatcgtttgagccatcactttaaccaggctcagacagtacttgctttgaataggctccaaaaagttttccatggagaacttatgtctatagaactgtctgctcacccagacttcataaaccctttgtctatccagacaggaaaaaaaatcaacattgcactgttattattaaatttatttagtattattttattcttcttaaaaatacagctacattcctctcttaccacaatatatctggaacttgaaattttgtatctgctttttaaaaccattttaaggatatcaatgacttatatcctaaatagccaaatataaattatcccttacttttcttaacagtccagagcattatgaaatgaaaaaccatgttttactgtgaaaagttactctctgatttttgtaaattcggatttgggcacatcaggccctccactatttaatggaaataaaagtggaggtataacttcacattgatgatatcaatccctattttgtgctttcaacattcacatctttatttgcttgcctaatgtgttaggaggaattcaagtcagtgcaggacacagaaaccacactgaaggttttaagcagggacagattaaaataggaaatttgtttctgacaaaattattgaaagggcttgaaaaacagcttctatgctggacctcgtggaatgacttcagaaacaaaactgacccactaacctcactaaggtggtcactggagctgtgatggaagggagacgttccactgacatggctccagggtccttcccacatccaaaaagctaagagaatgaatactgggagctgtgattctgagactggaaagccagatcatgacgccagcacctctgcccctgcttcttgacaccatggaagcttgagaatggacagtggagcgctgaattaaggagacctcctatcttcatgatctcactggccagcagcaacagctaaaagctacaaaaggatgacttctccctcacacccgcctttcagatttcatggaaatcagtctaattggtggatcgtcatttcttctaaaccgcagctgcaagcatatctgggaaacataattaataatttttcaaactcttcaactagaggaaagttgtgagtgtacaaataatttttcaacctcttcaacaagaggaagttgtgagtgtataaacacctatataaacaacagaggcacaaagtaatattcattgctttatttacacattcaagttgaatatagatagaagatgacaaagtctgatgaccagagaccccagtttcaacactgttaaaaggaaattgaggtcacatcaatcctaagtaccatgcattcagattatggtttcaagttcaaataacagctaatgactcaattcatatatatccagaaagacagcccaaaatcaccccagaataatactcccacgtctccactacttgacctctctaccattcaactcaactttgatgtctaatttttgccttgaaactgcataaattcagtcttcaaaagtttattgttctgtaggacaaccagaaatttacactcagttaagaaacataagacgcagttgtcttttagcgtgtccattcttctgaatgtatatcactcataataataataaccaatacctcaaagcaaataaagtattttatgatgtggcttagtggttttatttatgcctcctcaggaagccaagagaccacaacacaaatctgaaaaacaattagcctgtttctgattaaacatgtattgcttaaagctgtagcaagtgaacaagtgaaaaagtttactgctaattcatacaagcagtattttttgctgggccctttaaataatgaaagctatgcaaatagtggcaaaggataaaagaaattaaacacaatttaatttcttcattttgaaatgcaatcagtaactgttttcattcatactcctttggattttcttatctatcctgtgcaccaaggaaataaaatgtatctagaaaggtcaattgataaatgcttattagcttaaagcatgtttaacctaaaatcttaatcctaaaattatttgtttagtggaaattcaaaagggcaagtcatattatcaaaaatcatgtggctaatcattagtgttttatctttaaaactacttttaaactaacaagcatttctcacagtttgcaagttgattcagtaatgtacctttggccttcatgacccactcacttatgaccctccaaatctcctaccttctaagtctgcagtcagagaacacatatacagaaggagccttaggtgttatgctcacagtgtaactccttatatattcaatttaaaatacaaaagtgcctcataaacaaatctaatttataaagtcttgataaaatgcatagatgttggtgaagatacttattcatttaagacacatgatgtaaatagtcaagttctcatggtatgcacacagacaaaaggtggaaaaatttagcaaatactcatttttttaaacagggtcttgatctgttatccaggctggagtgcagtggtgcaatcatagctcactgcagccttgaccttctgggctcacgtggtcctcccacctgaacctcccaagtagctgggactacagacttgtatcaccatacacagctaattttttttttattttttgtagacatgaggtctcactacgttgctcaggctggtctcaaacttatgggctcacgtgaaccacctcagcctcccaaagtgctaggattacaggcatgtgccactgtgccctgtcccaaatatttggatctttagttcccaaaataccgagtgtctgcatatacaaacatatctgtatattggtgtttttagttttcatttggaagttttccataaaaaccacgatcttagttttcttagctatgtgccctgagttgtgaataataattttgataatgttactatccctttaggaaaatatttagcacagaaactctgataaatgtgtcttgtctgttgcaattgagtatgtttgcaaaaagaagaggatttggaaaagatatttcagtaattcaacatagccaaaaacttaacattgtataagtattaacacactactaagacaactaatcttattttatgtaccacaatatacttaatgagtaaatttaactaaacctatcacagtaaagggtaaatgactactccatgccttttacatttgaagcgggcaccagtaatgctcacttcagtgcagggtctctgcggtgtctgcactcattcctcaaggagtagcaggccacaaactggttattgagtttggaaggggaaactgaacaaatgtttcccaccctcttcctagttccttcatctaaaaagcgtaaggcttgcaagtagcatgaattttcatatgcgccattttgctccatgttgtaaaggatcttgtctctattgaggaaacttgtggttttccaggactgctgtaattggcaatcatactctccaaaagcagatttactaggttaaaaaaaatgtggtaatttgctccacttcttttttatcttttgtcttctcacttggttcagaacttaggcagtttaatagagttctctttattggacccacttgagcctcatataagatttaatttttaaattgtctgaaaaagagtctgaggttcccaagaagcctctagttcattaaaccacttgactttccaaatctatgtgcattagccagaatctatgtgcaaagatctacctatataaaagcccttctataattacaatttctacatgggcttttttttttaacaaagaaatagaaatgggaaactcaaccaatttatattttttcttatacagctcatcatagaaatagatagatatatataaataactatatacatagttatataaataacttttctttaaaacatttttaaaagcagaacacatatttaatatatattaaaaggtcacatgcctaatatagttttctgttgctctctaatgaaagatgcatgagagacttatttacaaggtttcttaatttcagcattggttgcttactctgccccaaattcacaagtaattgatgaaggcctattttgttaattatgtgaagatctgttttaattgtgccttctattggcattttcatacaaaacaaattgaaattgcaatttaggaattttccagtaaatttgatcaatgtaggccaccaagcttattaattcaggcaaagaaacagatgctggctatcagaattgatcaaatgagtgatggtcaacaaattcctactgttttgtgtactatggacacatagtctaggaatttatcctaacttctcttcttctccatgaaatatatgagaaattgcctgtctccaaagccaaaactaaaagctacttaaattgactgcagatgcttatgtatctcaagattaatgcactgtggatacagaactctcaacccagacttcacaaccaaatcaactggagctcatatggcacacacctgtggaattcaaccaactaaattctcagagatttggatacaagtagatatatttttattaccagaaaggaagggtaaaagcagaagcattttgtaagacctttcttaacaagcaagtatgtattgcaagggggctctgggaaatgaggcctgcaggaggggagggagtagacacaggatgcacaggaaagacgatggcaagtaccaaagaaaaatatcgttgatttctaaaattagaaaatagcatcagtgactgaaaaggaccatatacaaagtttgtgggttcttttcattgattattataaccaattgcaggttccattaccattttccaaatctgctatcttttgggttcataatttgctaaagctttggcccccaaagaagcattctatctcctattatacactaactttcctagccaacatttccctctcaagcaatgcatttttttttgcattgcatgcatgaaatttacagaacgtatatcccacttgttgaaatccacaatgcttatattaaaaggtagagagataattaatgcataaaacactgaaaataaataaaaaccattgtctccagaaataacttgccaaaaatgtaaccctagagtcctaagtggggctggaaagcagaaaatgctcatctcaaacacctttatctctttttttccctccttaggaatgtccagaatgtctgaggtccttatgaattcctaacttcttgttcagattgactcacagaaaaaaaatgcccaataaactcatccatgttaagtaataaatttgtctacatttttacattaatgcatcatgaatattatctttttctgacacatacatttcaacaccaaaacattatatacaataaggaaatcccaatcattttaataatggagaagaattaaccaggtctccctttaaatcatgtatttgcctacacaagctggcttctttcagtgtacttactgtacatcttgagaagcaacagcttcatatcatctggaccaagcacagcgagagttcaaggaaagttgactataacagggagttgcaataaatcatcattgggagtttgaaggtgacagtgtctttgctgcacttgtaatccctttcatgatactggagagggcagagggagagttaaaaacagtggacatgttcatctccaagcagcctgactgtgatgtttctagggggaagaagttcttaaaacatctttttgaaattctctaaaatagtagtgcctcatagtgtcaataatggggtaagggattaggaggataaatggatataacagaatgagacaaagtcagacttttaggaaacctacatctcagaggtgaagaagatggcaagcaagaagcacaaataagataattaaggatgataaaataggagaagctctccatgggaagagatgtgaggagacatgaatctaaaaatgagatagcgatgtcaaacacagtgaaaaaaaaaagtgctcaggcaaataaacaggacatgcaaggaccctgagctggtctctgggcctccccgacaaagactaaatacctacaaccttcattccctgacataatgctgtacattgggggaaaaaaaatatgccatttgtagagatcactaacaacagccaaactgttttggctgtttatactaacaagatttgtcaatagtctgtagacagttttatatgtgatgctatttgatatggtttggctgtgtccccacccaaatctcacattgaactataataatccctatgtgtcaagggtggggccaggtggagataattgaatcatggggggtggtttcccccatactgttcttgtggtactgaataagtctcatggtatctgatggttttataagtgggtgttcccctgcacaagctctcttgcctgctgccatgtaagacgtgactttgctctcatttaccttccaccatgattgagaggcctagccaaccatgtggaactgtgagacaattaaacttcatttctttataaattacccactctcagataggtcattattagcaatgtaagaacagagtaatacacaatttaaataatgtataggtaacatttttcctggatcaatctatacggactttggatgagagtaagaaggaagacaatggcctcttctctttagagttgaggaagtgactataacaaaagctaaacatcaatttgccaagaaaaaatgcaaatttagcaaggatattccagagaacagtaccagccagttctgctaacaccaaatgtagcagggaaataaagagagagtaatttgtatttatgaaatagggaaagcaaactaccttggggatgactattttcttattcctagtaaaagacccatttttgggaaatcacaacagtcaacagagaagcaggagaaacaaaagtcttcatttccctcaaaaacactttccttgacgtaaaaggagcttcgtttgttctcttactgcagtcacagcaggatgaaaccatatcataattcttaattccaggaaatttaggacaaattatgagcaagctattcttttaaaacagctgctatttttagtgtctttataattatttaacttcctggaaagaataacatatacaactcttcatcttccaggctccaatgtttgggctttttaaaaatgtttaagtaaatgttagagtagttttaataaaaacatgccaaattcaccttcttctacccacagtgtttataggttcttctgtatcactatattacctaaaaaaaatggtcctgaaggaaagaaaaagtgaaagtgggggctttgaaaattatatattacaataactttatattttggtaatcatatctttttttgagacggagtctcgctctgttgcctagcctggagtgcagtggcgcaatctcggctcactacaacctctgcctcctgggttcaagcgattctcctccctcagcctcctgagtagctgagactacaggcgtgtgccaccatgcccagctaatttttgtatttttagtagagacagggtttcactatgttggccaggctggtcttgaactcctgacttcatgacccacctgcctcggcctcccaaagtgctgggattacaggcgtgagccacaacacccggcccaataatcgtattttaaatagtgatattgtagttcaacctgctggattatgttatttcaactctatcctttcttagaacagagtagctaatacatacattcaaggactcttagagaatttataccacctagacatcgtgcaagtgagagaactgaattcagcccgagaatcttcaacaacttacctatgataccatagggagaaagtgaaaatggctgatgagggaaatattttcaggtgactattttgttcagagaagcagaataaaatttctcacctgtatggacccagatttacaccctgaagcaaagtagaaacttttaactgtgcccagcctttcagcttgtagccagggatagatggaaggctttgcactcactcccaacaagaaaagaatccaggggaaaaaatccagttccgccccaggcaggcagagtgatggtcctgagcagagcaggcaaattttttctgtaaaaagacagacagaaaaaatttttagtgtctagggacaagaaacaaattatactatatacttttaaaataagtgagaaaacaaattctcagaatgttttcgttgatgaaattcaaaatacaatgataagtgagtactttttttgtaatataggtctaccaatgagaaaagctgaattctttatagggtggataatgtgtcacctaatgagattcaaaggtaaaaactgtctctggtgtgtgagccatacaaaaacagtgagctgtattcgacccataggacattgggtacccaccctggcattcagtgtggctctatgtggtactacctaaatgtcctcccatccggtaaagaaaaacctgggctaaatttcttaagacaggtggggtaagatgtaatgtttctcaaggagaaaaactctcattattttaaagcctgtagcaaatacagcagttgtaccactgaaaaaggccacggcgcagcaaattgaaaatggtgctaatgagaacagcaggaagaccttaagaatcatgacaggaatggtgttcatgatcaaggggctctagaggaattaggccttggtccagcctttaggtaaatatccatatttgctttatgtaaatatccataaagcaaaaacttccaaaattgttctcaggctatgaagtgtgtgcttaaattatcttactccaaggcaacatgccctggtggaggaaggtcacatattcacatctgtataatctttttgttgcttcttaaactctgagtctttaacaccgaaattcttttgcctctcccaaagcttggtcattccgttctaattcatcagaggtgatcagttttctaagagagaaagaatgagatacaagtgaggaattttcaagcttttggagataaaggaggaatgacagtgtgtagtttgatgcaaaagggaacacatagaaggaatattcacttaccagatacacacttgctgaatagatgttctagaactcttgggtcatgccactaatggacatgttactgatgaggttcaagaagtttcaagagccctgtggagatctaaaattgtaggccctaaaaaagtggctaaattaaaatacaggaggagtctagagataaattttgcttctagaaggaattgcgtccatggctggagcttgtcagccaatgtaactcacaccatcttcgtgagtagtgttagctttgaggacctttgtgatcactgagtaattgcagaacttcatgttcactcaggacagtgattgctggatttagaatgtgtgcagcttccaatgactaactctgtgcatcactttctctgactccataatcccagtaggcccttctcccatgagaaactagggaagctttatcaagaatgaagactatgagatattaagccacttgcaagctaacatattagcccccacagcttcaacgtgatgggctgaagacactggactcctagatcaaagagaaaagactttattactgaaggcacaatgagcatccttatcttcatattttcccaggtggatacagcacacacaatgggtttgcatcatagatgagcaaccccttgctggcaaaaccccagtttttaatagaggtgcagaaaagaaacccaacgtttgccccagatgaagacattgtatttattagactgcaaagtagacaaacaccttttccttcagagagagaaatcatctctatcttcaaaagctgtttgctctaccaacatcctcgaaaagacagagtgatcatcaccaatgcctttatttgcaagacatacatggagaattgcctcccaatatgcccagacttgcttaaattcattcatgtcacattccctattgagcttccagataataaatgaattacatcaacctaattcttctctttcccttccctgcccagtacactaacatttattggttaggcagtgagcaactaattattttttttatttatttttttttgagacggagtctcgctctgtcgcccaggctggagtgcagtgacgggatctcggctcactgcaagctccgcctcccaggttcacgccattctcctgcctcagcctcccaagtagctgggactacaggcgcccgccactacgcccggctaattttttgtatttttagtagagacggggtttcaccgttttagccgggatggtctcgatctcctgacctcgtgatccgcccgcctcggcctcccaaagtgctgggattacaggcgtgagccaccgcgcccggccaagcaactaattattgaacatcattctaagacatggctttattcttatgcagctcaaagtcattaggaaaaacagtcattaggaaaaaaagtgagtcatgatttctaaccactgcaataaagataacatgagccaagccatttgctatttctcagattcaatttttgcttacatttcactgaacagaacttagtgacatagcctcacatagcaggaaaggcaaggaaatgaatacattgttgcctggaataacatcaggattctgttactaagcaatatgggaaatatggataatgggtgcaattaaaatctctgacacaagaagaaaacctgtaaaagttatcatgaatgatacatctttgggaaattattctgctcatataaaaccaggtttccccaaatatgatttaggtattcctgtcaaatgttaggtgattatgtaactgaactagaagatagaaaattagacttaacatgcttacttattccattaaacaacagcaaacaaacaaacaaacagattcactctcagtttagcatttatatatgccattgtgtggtaactatcatgtggtaataatctaacaacataaaatattgctttaagattaaagtaagatcataaaatttccaaatactaagaagttaccaaaaattgtatactacagactcactgtatactatagttccactgaaggttgtttcaagaagttcttttaaaatttagaacataaagggcaaggaggtgaaaatactagacaaaaagggaagcaatctaaaaaatagcctaattctcaaaacaatatattagaaatttcagaagcagatataatagacaaaggagagataataatcaataaaataatagttgagaatttctttgaattgaagaaacattaaatgttaaaaacatgttatggtagtagaaacataattatactggaaaatatttaaatatttttataaagaggagataatagatgggggaaaagtgaatgtgtttcttttccacaaatatcaaatttcagaagatagtagagcaaaatttctagagtttgagcttcaataccttcatgcccaatcaacctaagatttaactgctagggcaactgaacagtattcttacacatgcaggaataatactacccacgtgctctccccccacaaaaaaactgaaaaactatttcatcaattgaggaactgaataaaaataagacatctgtgatgtactgacaagatgaaatgaaaaaggcaagctcaaaatatgtcttacaatatgaacgttttgtttaaaaatagatattatacatgtttaatggagatatgtatctctattaaaaagcttagaaatatataatcaatatgttaatagtggttatgttttactagtgggaaaaataatttttaatatttatggtctacacctgagctgtccaacatggtagccactaacacatgcaactagtaaatgcttgaaatatggctggtcccagtgagaggagagatatgctatagtgcatgccagatttcaaagacttaatgtgaaaaatgaatataaaagatcttattgataattttatattaaatactaaaatactcatatcttcaataattacatgaataaattttatttttaaaattaattttacctattttttaaaaaattatctcacaaatgtaactactaaaaagctttaaattatatatattgtgagtaatggaagtcttattcgaattaacagttttaaaaggaaatctgtaactcatggagctggaaatagtattggtataactcatgagatggaaggaaaagctatgggaaccaatattctggtcattatccacctcccagctctgtattcgactggcttctttctgtgggaggcttctctccacctagcaggaaacatgtttgccagcaactaagttttgcatcctcccaaataaaagaaacatctttctctctacatgttgatatgttttttgttttgttttgttttgagatggagtcttgctctgttgcccaggctggagtgtagtgtcatgatctcagctcactgcaacctcccacctcccaggttcaagcaattctcctgcctcagcctcctgagtagctgggattacagttgcccgccaccacgcctggttaattttttttgtagttttaatagagacagggtttcaccatgttggccagggtggttttgaactcctgacctcaagtgatccacccacattggcctcccaaagtgctgggattgcaggcatgagccaccgtgcctggcccatgttgatatgttaaccaaaaaaattactctgtttggccccacttgagacatatggaaactcctggactagtatttttttctggcaaggtttgcatggcaggtagacaggggacctgcaggagggtgagagacaggcagaatgggcttgtcagggtccatgaccagaaggaataagacggtgttttaagaagacagcccactagaaccgaagtttgaaagctgttatgctagataaatatttcatgaaatgaaacattatgcattagaccatttgactcacatcatgtcccctacacaaaagtttggaaagtggcagaaaatagaaagattgaacaatgatttcagggataaaatggactaagtataattgcatgatctgtctgttcttgcataaatcacttctataagaaggattatatacgtttttgctttagtttgttaccaccacagtctggcatataaactatgcctgcctcttaccctttgtgaactagagatcctgctctgtttttattgccttagactttcagagatcagcaattacaaaagcttccaagacttttctctgctcagaagctttgtatatttttgcaaaagaacatagtttgggatgtatctttgcaggccacaggttctttcccacccgagggtcaggaggaggacatcaagagaaaggatcagtgaagacagagcttagagcaatcacagctttagtcttcaccatttagctttctgctctccttccctacgtagatctatctccactatttatagtggagaaacacagatgtgctcattatttccttggattgatttaatgtaaattaacttattaataaataccctttcttacctttccctgtccattatctcataacatacacagcacatgaagcaaacaaggaagtttcctggaggtattacttgttcatttatcacctaagtgtctttatcctgcttttgctcatctaaactgtgtagtattgaaaggaaaaaagaaaaaaatacatgaggaagaacagacatgtcctttcttatttgcatttctccatctcttgtcatcattctcctttactacaccttggccaacataaccgttttgcaataccagcaattcctactcccttatgataaatattcacctcttatcttctaatatcttataatctgcccacttgggaccagtaacacctacaccagagactatgaatgactggtgatgtaatttaataaaggacccaagaatatttggaaacagcccagtattcactgtcagtaacaatgtttgtgaatatctgagttttctttcggcaaaatcccttaaaccttatttatttatttatttatttttgcattatagagggcctgttcaccataaaaagcacaattcgataaatagcaagtaatgagaacaaggcacacatgcagtagtaaaccagaaaaggaaaatgttactgctgtagcagcacaaatgaggtcatcatggtacaggggctgtaatagtcagaggctcaacttggtggtcactagcctttgatcagcaatttccagttagtcagagtcatgtccaaggacagagggcaaagcatgaaagacgtatcagcaataagtcagaagcaggaaaatggaaaaagtcttaaaaaaaaaaacaaaaaaaacctgacttggaaaccagggatgaaaccaggaacacaggtttcagctcccaggtcacatttctcccaggtcacagctgggagaaatgaagctgaaggtggagaaagcatggaggaggtgagtcacaggccaaggaacaaaagccagggaacaaagcatggaacaccatgagtcagccatgctcaggataatgagcaaagacagcctttccattaaacagctgccttttggaggtgcatgatggctggactttcaagtcttaagttagcaggaacatggggctgctttgggccctgcttctggacacttgagggtctgatggacacaagaaccccagtggaggtacctctaaaagaattcagatcccatcaaagaggaaggagagagattattccaaaatgtgatcatgtgataaagaagcaagttgagaaggcagatgggcccacatggcggaggacttaaggaggatttaagttagtgaattcataccctgaaggctctttggaaaagcagaataacatcataaaagcaaaattgtgtgcagaaaaaaaatcaaggactttctattgtactttgaatctctgtttcatttatgttttaaatgtctaatttaattgttgcagtcatatttcaaaatcgtatggcctaagcagaaatcataaattttattaagtgccctgtttcttagtccagctgctgtaacagaataccacagacttggtaatttataaacagagatttcttacatttctgggggctaggaagtcctaggttgaaggggccagatctggcaaaggccatcttgcaagataccatggcagaagccatgagggtaagagagcattggatgaggaagggaagaaagtgagatgaaagcatccttttatcaaaaattcactcttcagataagcgaccttctccagccaataatggcattaatccattcatgagggttagctctcatgacctaatcacctctttcaggtcccacctctcaacagtgttaactggggattaagtttccaacaagtaagccttgagggacacattcaaacaatagcattatgataatgtaaactttaaataataagtaaagaaatgaatcccttttccaaaactttccaaatctgttttcaagttattaatctatattcttttatatatatgcatgtttatatatgtgtctgtatgtgtgtatgtgtgtgtattccaataagtttaagaaacactaggaaaacaatacttaataggtttctctactttagaactaatattttaatctccaagattgggatctgtttgcattacttatcaaattgtttgaccctgcacgatttgttcttgaagcacgtattggcatccttcctggtgcaagtgttcattggaatatccgtttgagagaatctgtttcagtctactggctttttcctaagaaaccaagcagattgattgatgttgctcaacaaaaagatggtttggaatgaagtagctattcatggcagaatctaccatctcccaaaccgtcaaattatcggtattgttctctctctctctatatatatatatatgtatgtatatgtatatatatacacgtatatatatatacatatatatgtgcatatatatacatatacatacatatatatgtgtatatatacgtatatatatacacatatatacacatatattatgtgtgtatatatatatacatatatatacatatatataaaatactttgagttctagggtacatgtgcacaacgtgcaggcttgttacatatgtatacatgtgccatgttggtgtgctgcacccattaactcgtcataagaaaatgtttcatgcataatacactgaacgtcttcttgagaaagcagcgtcctgctttcaggattctgaaggcacatcaggatctttggtggcttgtaataattattttcaaattccattttgctggtagaacacagaaatccaagttttaaaagctgcttcttaacatgtggctagataactaaagtttatgcatattctgcaataagtatatcttcatatatttatacacacacacacacataaaaggaactttcatacacaccttgcaactggtcttgttaaatttttttaatgttggttatgaatcaatgtattgtattgagcctgagagtcctaatctacagaatggatctattaatttttattcttctgctaaagtgggtcaaggaggtgaaagtattttgtaaactctttatgcaaatgcaaatggtattattcagtatatttttgttgtatagaatatatttagtgtccttgtttaactgagtggcttaatcattggaatagcttattcacctgaagcacatactctttgggtatgtatctacattaaaacctaagtcacatgaataaaacagatgtcaatcaaaattgatatagattatcattgaacttgcagtcacatcgtgtagacctgcctaggtattaaattgggatgattagtccatctacctctaaattctgaaaaaaatacagatattttcccccaaggtttgtgttgctcgctgcatcttctaaatgtcacatgtaacttattctatcccactcttagccctaaatttttgtctaccaaatccctctataaaaccatgactgtgaaataaagggagaggactggatacgatgtttgtgacaaaaaatacagactcataatgcaccaaaacacagcacttagattctgagtatttttattttactctgagaattaaaagcaggctgttgacgcacatagtcaataaatcaaacacatgaaatcttgggctttttccccagtgtccactttaccagggtttctaataaaaagtcccatattttgaattcagctcattcagacctcaaatccaaacatagtttaacaattgaacaatggctgttgttaaaaaatgtcacaaccaaacgttaaaaaacagttgctaaaacatagactgttcaccaagcactttcacctgatttgtaagtacgtagttaatagattgggactttgcctgtttttgtttttgttttgttgcctattcataagactcttaggaagaaaaaactgtcaatgtctacagcaggaagttaaaacaaactgagcactacatgtaaacattgtttgaacctacgagttggctgaaagagtgaccaattcctgaaaaaagaaaagagacaaggagtaacgagaatataagttcccaacagaggctaatctatatgttttctaaagctgggaaaataaaacgcaatcagaatatccaaatattttgcaaacactactaagacatttcatttggtccaagcccctgatttatagacattataaacaattgggcaaagcacaaagcttgctggagattcttcaaaagaatgatacaaacagcaggaagaaaattaataagcaacagatgcatgcatgagcattctgtgtaactggctgtgagtacagcatgtgctgttttgtttgtgcatgagtttccttaacacatgcactatttgtatctgtagatatcataccaaaaaaatcaccattacgaaacaggcttacatattatcaattactacaattttaacaaaatgcataaagacaagtattcatggtgaaaaaatacatatattttacctctcagtcacataccttttttccttcaaaaacaaacaaatattggataagaaaaggcaaagcaatagtttgccagagaatcaactgatgcacttggttgcgagacaggttttaaatgtgcaaattacttccatccaatagttcgcttttgtttcaaaccattcatttttttatgtacgaatttttcagacaaaagtcatatgattgactctgaataggttatgcctccatcctctgtccttacttttaccttttccatgtctagctgcttataaaagtgatacagaactacgatgctgcttagggctaaacaaaaatcaaatttaatgtgcttgtctctactcaaaaaaaaaggtcaaagattgaattattttcatcccacactgttatccttttattctttaatcataagttctacagatatccagtaatgcctgttgggcaccaggtacctggaactgggggtgtaaagatgagaatgaaagacacagattctgttgtcacagaatttgcaaccaagctaataaaaagccaaagataaaaatacattcagttaattagttttgacatccagcaactgaatagtcttaccaactcatataatatgctcattcaaatattcacacatcattcattcaacaaacatttattcttaccatgtctagttatgccagacaccactatgttaaatcctgaggtaggtataagaagcaaaaatatacttgctctggaaatgctcaaagccaatcacataagataggcctgaaaatatgtagtgctagaatgcactaatagaaatgtgtactgatacaatgccaagcacatagtaggtatggaaaataagatgttcttgctttggcaaaaatagaccaaggagctatttgcctacagaggagctaattattctgcctgatgaagctggataattttccataaaggaaatggcatttgatttgggtttacatggatgaaaacacatttcccagatggtgaagaacacaaagactgtttttggaagaggcaaaatcacatgtgaaagcacagagacccattaaaaatgtgtagaataatcacacatgcccgatctcaagttctaaaattctagtgaagatggatttactctgtacattatatcctcggggaaattttagtttccatgcacatgaatttacacttctccctgacttagattattagagaaataggaaactagaagttaagaaaaggaagctgaaataactcataagggaaaagataaaagagagatgaggcaatgcaatgaaactgtaggagagagaaagagagctgggagaagattatccccaaaccttgcaattgagtgttttggtttatgggtgaaaacatccctgaagttataggtgaggaagggctttcttgtaaatttactatgttcagaattggcaccactgggccctgcactggggaatgcaagttgagaaataaagactacgtgaggttagtttttcagctcaggcatccacatgaatgtctgcagaaatgcggtgaaaccacactgataaaaggtaaattaaaatcataaaatcagagaggctttgaaaattagacagtggacaaacacagggactcttctgcactgtagattaacaccatcaaacaaaacaaatgtataagttctgtatttaatatatggaaaaaggagaacagagatactgaaaagtcactggagatcaaagaatgataaattaatatatatccattccatgctattaattaccaaatgaaggaacgtgtgagatattgacattctcattatttggtgggctgttttcatggctctattttagaaaacataaactatgttcatcagatttttgagagattaactaattatctcatttccccaatcctaattttccctggcgggattgtaagtttcttacatagggattttagtaatctaattttatgtatagagaagagactattacattgtggccgactaaattcaccacatcccacgtggttgtatacacacaaccttaggagaattgcaagaagcaagtttgtcaaagtgaaaccaaagagtttgaaaagtgtcctgtagccggtaagaaaccaaggaaagattttaggtaactctgtcttgaaaataattgtttattactgcctcctcttcttgtctattgagagttctttttgtaaggtgccatctttaaattatgttgagtcttcctggaaattcagtggaaaattcttttttattgagaacatatgcattaaaggaaaggaattttacatgtgtgagaatacaaaataaccaatattctaagttaaagagagagacggaaagagagtaacttgttttgggctccttcactgcaaaagaaggaggtttggtattgttttcatttttttaactgcatgcattgcttagtggacaaatgaaaattaggcaattctatttgccaaagcttcaagatctcactcttgaatcagaataccaagtacacttaagatacagcaagaaggaagctgcaatctggcatcacacatgaatcatatgtaaactatgtacagtagtgatcttcccagtggcagaaaagctcaaagccacatgaaaccaatcaacaccatattgatgtcatcttctcaaaacttctcatctgtttcatagccatcagacattgtgatctttaaagcagatatttaccctctctgttgctaactaagccaaattttgcattacagtaattttttacaaaatatttttttcagattgttgaaagaacataaaatgtagtggtttatttatttagtggtaacagtaattaacactaatattattaactaacttataaactgtccatttaaaaacatgcttatacatttattatgtgtcttttttaatgactagatcagccagactcctaatagaaaattatgacattctcaaactggataattggagttcaataaaacacctatttctaaaagtatggataaagctaaaaatggtagctcaaataatagtaaaatacctctttcttgcaacctctgataggcaattgctcctctggtttggaaactgtcccttccagaactcatgctgaaatgcagttgctattgtgacagtatcaagaggtggagtctttaaaaggtggcaggccatgagggcttcacccttacatgtggaatgggtgcctttataaaagggtaaaattggtttcctccttctctcttgacattctgccttccaccatatgatgacacaataagaaagcccttgccagatgctggcacctcaaccttggatttcccagcctcaagaagtaaatttctgttcattataaattaccacatccgtgtcattctgttatggcagcacaaaatggactaaggcagttgtcaacaacttgacaaatctcaaactcccccttggcatctgaggtacaaggcagagaccccactgagaagtcttctatgtgtttacatgacatgagtggatttagttttcctcatcataatctgtcagagtttcctcttagacaagcttgtgaaaaatacatcgtcatgcccttaacactggattggaaaaactgcaccaaaatcgcttgaaggaaaaccgactgaacaaagtttcacaataatgtcactcctacaatgcatcatctatgcaaaacaagatatcaaattctataactttccagcacactaaattatctcccatttcctctactttttttcttacaaaaacacatactacactcacacacgcaccttaattgcctatcaacaaaaactgtgtactgaaacttccaaagaagttaggtgagggtttaagtattccttttacatttgcatgcatgtaagcacctgtgatcataggtcttacctttcatggtttcctaggtaataggacctcttcgttgatagaatgatcctaatattgacataggaaaaggggccacaaataagagttgggctgttacttaggaaagcttgtcattgttacttccccagataacaagaataaatgatgcaataaaagaatgagtgcctgcttcagcaactcatcattaaaagtgaagaactaccacaggaagcagaactcgaaaagaatgtatgcacttatgcaacctttcttgtagctttttgcagctaattcttattattatacatcaagataagaaaaaaatcacataaatctttgaagaaaaatgaatgaaagagggctttctttaaaggttactagctaaatccatttctttactttctgattttttctttcttttcttttaaataatcattgaaggcattgattcaaaggaagttaatgctgcaaaagacctagaaatcatctaggagtcttttgactttaaaatactttttctgaagaataatttgttcaagttcagtaaaattccaacatgtgacagagctttgttctggctgaagtccacttgggttcccttcctcttgtagctgacatcagtagtggcttctacagggattctgggtaattcctcccagagcactggcctggaatagtgccctctatgtagaaataagaaaaaaatgaggcacagaaagatgaagggatccaccatcacaaaagtggtacacagcagataaacatctcttctttgcctttttatctcctacatttgtcttctcatctttaattcatttggtagatctgcagaataactttccagagaagatcaactgcaccacatagctaaaagctgacttcctttttttttctttcatttcaaaaaatcaaaacacctggttgtgaaatgcaacgttttcacagaatatttaatttggtccacttactgatagtatcagttttatgtgaacagttacgtggcaattaaatttctcagattaccattttttaaagagttctccagagtgcgtcaatggcaagggatccatttttccaaacctgtcttgtttccttagtgagtcagtctttcaaagcttatattgcagtcattctttgtattataaaagtgatccctaaagtaagaagaacaactacatgtagtctctataaaattcctagcctaaatagtcatttcaaatgccttgctttctcaagtattgcttaatattatgtatgactagcactgtacaaaatatagaacacttgggagaagattatggcaacagtgagatctgggaacatttgtgtattggaaggaaaaaccatgattctgatgggcaagaaagagaataatcttgaacaacaaaagaagaatataagagtttggcatatcatgcttttccaaacgtatggcttcatttaacaaacttgggacagtctttattttttccatgattacttgtgtgtcagcaggcatagcttggccttctccttcataggcctgacactgagtcaatgcttagcatccaaaccacacataaactattttttcccctagaaagtgctcattggatgacttaataaaagtattttaatgtttggaaaggaaaaacatgtttgccttattcctttagatttacagctgcttagggtttatagaaaataccgttgtcaacaatattcaaaaggcagaatacaagagtttgaggatgcaatcttgctacccctatgttactcctaccattctgatatggtttggctctgtgtccccactcaaatctcatcttgaattgtaatccccacatgtcgagggagggacctggtgggaggtgattggctcctgggggcagtttcccccatgctgttctcatgatagtgcgggagttctcatgagatctggttgttagataagtgtctggcatttcccttgctcgctctctctccctccctctctctctctctctctctctgtctctcccctgctgccatgtaagacatgccttgcttcctctttgccttccgccatgattgtaagtttcctgacacccacccagccatgtggaaccatgagtcaattaaacctctttttttcataaattacctggtctcagtatgaaaatggactaatacaaatccgcataccagaaagccagagtgatgtagtctgatgcagaacagaagttactatagaaagtgtggcatgggtggctgattcttgcaggatgctgacttcttgatgagttttcaaaccttggactttgtacacaccaaattgttctgagatcaggacaactgacttctgattctagcgaatttatgcaattcctgtaagaacagagcaaggaaagatgagagcctgtagcattgaagtcacaaatgataacaatagcaccagtataataatagcaaatgttttgggagcatttactattccaaacactacactaaacactacatgcatcatttttcttattctcacaataaaccttatatttctgttttgcagatatggaaaacaaagcttaggaaagttaggtaatccatctaagttcacagagctaataaattatggagtgaatattaggagtctggtctttccctttaataccaataccctgttcttaatcagcaacaaggccacttccatctctgagtgaggaaggtggactagatcatgtataaattccagataaactctttcaagcttttgattttatactaaaaatcatctcctaaactccactagcagaaaaatagcatatcatctccaggaacacagtcctcaacagctgcttttccaacctcatctttcaaagcaacctgttcatacatttctcatattctaagtgaacaatttccaaggcctttccacctctctgactccatattcactgctgttttttattctcactattgtctcccttcttgcacttttacctatcaaaattcaaactagctataatttccaaactaaatgccactttctccataaagctttctcatcagatgatgtctgctctacgaataatttttaattaccaaccacacatgtcctgtgagatgttatagccttttgccctgtggaccacacatacagtgtggacactgtaaaaggaaaaaaattgtctaataactctgtctaattatcaatattgtctaatgactctgttcacctactatggaagtggctgattcttctcttatcgctcatctttacctctacattaacccaagtcaagtgcagccaataaggtcacaatgaactgcttatttgtaattattttccaaaggattaaaaaagtgcaacatatcatttacagatcctatgtaatcaggaatctttacataaataaaagtcaagcaatttcagaaaaatgctgctaggaaacaattctgtccaaaaattcagaaacaacaatacaaccaagggtatgcatgtgtaatccttttggtagcacattacagacatacttctaatacttctagtactttatattctgaagttgtattttcattatggtttctcagcaggaatttcacaaccagtgctcaaagctaatctcaacatcgctgatctagtttcaaaaaaaaatagtaatagcaacagcaaaaataaggttgaagaatagagcttttgtatgatacaaacttcaattagatgacacatcaatcttttcacatgccataaaacatacacatgtatctggaaacctcagttgcagtgcacaagaattaaatgaatattagggagataaagggagattattacagatgtacaagtagagaaggaagaaagttggggagaaggatcaatgagttgatgttcaatgctaagaaagcatagatcccaggtcctagaagcagggttctctgctctcagcattcttgaccaaccttcaatggcctcagtcagatttgaagacttcaaaataacacataggttttcctttcctttagaaagggaaagaaaaatgaagaactgcattttctttacagtgagaccacaactcttccacctctgtgcaaaatctatagggtcccaaggcaaaaataagaaaatatagccaactgcagatattaaataagtacatgcagaaaactttgtaattcaaatttattggctagtttgtaacgtgagttttcatactgaagagctataacatttttattacaaaataaagcttttgaaaatgttaacatttatattttcaacaaactcatgaatcagatttgtcttatgtcatcttattaagcatctaatagctaatatcttaagcgtttagtgcttgataaacaaattttgttgagtttttctttaaaaatggacatattaaattgactttttaaaaagcttaattcatagcacattgttttgagtcataacatcatcatttgttaaattttagtttttatgaacattatttctaaaatctaaatctcaggtgtgtattttccttaatacacaaaaccactattaactgtaaacagaaagaatttgatattaagtctaggggcaatctacctctttagtcctatagatcacaccaaggatgaataagactcataacagacataacaaaaatctctggtaggcctaagacataggttgggaaaggggaaattatacagaaaaagacataaacaaaaaggataaaagtacttaggaaataaagtacatataataaaagtggtggtaagcagtggtgtgaagacagggtacttcaggggacatgtaagtttcatgtacaataaggcatagtcatgggatcaacttctcatagaaaatactgtcatcagagatacactttaaaatgcaaaacaccacagtataacttccaaacacattaacctggagaggaaaacacagacaaaagcattctgatgtgagaatacatctttcaaacgaatgcaataagccaagaaccacctccaatctaatgcttagatgattgggagccaggaccagctcaaggccctggtcaactgtacatgcttttgcagttgtctcaagaatcttccagtgataagccagaccactaataactgattccaaggttatggcgtagagaactgaaaaggttccttaattgaaaaggttccttacccttcacactgctaacactttgtttccttactcacaattaaccttatgatcttaaattatagaccccacgtaataaagctgacttaataagaaacatcctgccttattctgcaaaacaataaagaagtcactctgattcattcaaattatggtaaatttaattttttgtgaatttcatgtaaaagctctattaaaaaatctaaaataaatacacttgctcagatacaaagaataaaacaaattgcaagaacgttaagtcctaatctggtggttctcaacatttgtaacaatttagaatcacccaggaaacataaaaaaagagaagattcctaggcttccatcctcagaacaattatattacactttctgggaggttagactcgggcatcagtattctttaaaagctcctcaagtcatgataatatgcagccaaggtagagaactacaggcctcatctatttgcttatgagatggtagcggagtgatagaaggaaattctcctatgagatgagaattcaaactcaaattacacaggatgagatgtgttgtttggggcaaatgaatcaagctctctgtgcttcagattctgtatccttaaaatggaggacaaatatcttctcttaaagaccagatacttctctgggttgtttaaggatcaattatcatagaacagctggcaagtggtgagattgcaacaagctggaattccctctcactcctgaatgcttcctttctccctctgccattgatctgatataagcctttaccaactaagcgatttattcccttcatttcacaaaatattgctttctcacgaaaagaaagtggtgattattaatttctagggatactaaaaattaagtatttttaaatttattcattccatagtcgttttaatatatttattaaaaataatctaaaaatatgcattatctaccatatctcagtagaacacttactcttaaaatagtaatcctcatgcaaaaatggtctagaaggagatagacatttaaaaatacaatgaatcacacaggtacaataatagaaaaaaaacatatgataaaatggatgaaaagagaagaaagtgtcaggaaatgctttgagcagaaaaaaaactccagtgcgattacagatctttcttactaaatctgcttgctaaccaagcttattctttcatataaaggaccatttaagaaatcagtacattgtaatttctaatcttctaaatgactgtttgccaaattcacatcaatttgacaaaaaaatcaatgagaatgtcaaatattgtaaagaacatctaaaattatcagaaagacagcataataaagaaaactatttaaactagttaagggtgaacactgcggacatttatacatgagctatctttgctggacataaacggcatctgagaataatctaaaccgcggtcactatgtcttttgtatacgtcttaccacagagctctgccattggcacagccaccatcttacactatttctttcagtcagggttggatttaggagatgacttttaagcaaccaaaccatgcagtggcacaccttttgccaagggaagtttttgggttttttttgtttttgtttttgtttttttaaaatggagtctcactctgttgcccaggctggagtgcaccagcacaatctcagctcactgcaatctctgcctcccaggcaattctcctgcctcagcctcctgagtagctgggattacaggcgtgtgccaccacgcccggttaattttttttatttttagtagagatggggtttcaccatgttggtcaggctggtcttgaactcctgacctcaagtgatccacccccctcagcttcccaaagtgctgggattacaggcgtgagccacaacacctggccaggaactgttaatagcacaccatgtgccatgtagactacaatttcactatcagttcccattactgagtgcagatgctacatgcccatgggaccatttctggtgaactttttgatcattgaatggagggatccagtttgttcttctcatagagccaagaaggtctttccagtgctgcaacatcctcatttgttaggagacatgagggtgaagaggtcgttgggcaagggcttgatgctgaccgctaatatttgccatgttagctccctcctctccttcatgagctatgtgaattttaagcgatcaaccagtatctgtggccctgaaaagatcagatgtgatcatttttctactcaactaccaaagttaattttgtatcaatcaaaataagcaaaaccaattgagctttttagaagatttcaaaaattacatatctggtactcattcatttatgtcgttcatgtttctagttatttattcattcatgacctacccattaaataaataattataaagtctctattataaaccacataatgtttgaggtactggaaatgaaaagataaataagacagcatccgtgcctcaagttctttacagtctaaaacaggatttctcaacttcaccattattgacactgggggccaggcaattctttgttacagaacttttcctgtgcattgtagaacatttaacatcacccctggcctcttcccactagatgccagtagcaccccctcaccaccttctccccagggttgtgacaaggaaaatgtctccagacattgcccagatgtccatgggggacagaatcactttcagatgaggactgctggtctagaaggaagagacagacattacaaaatacaatgaacgacaggcacaataatagaaaaacacagatgataaaacataggaaaagagagggaagtgccaggaaatgctttgagtagaaaaaggctcaagagtgtgattatagaccttctttctgactaaatatgcttgttatttctactgtgacaagactaccccaggctggggtgagaggcatcatgtgaggccatctcttcccagaatcccaaatgggatcttctcatttgatttcttacccttcacaccctcccctggattgaaagggataacactcaactgtgtttccctcctggataaaactactctaatgcaatatcttctctttctctcgatcacagtaagcctgcaggtccttgcagattattgcaagcatgattgagcagaaggaaggttgaagtaatgctcttgagtgtccctctgcttcagtgtggcaggagaggggcttagaagtccccgtgtgccatgcagaggtttccaaaggcagggaaattaagagccagtgagattgcagtgggggcttctatagcaagtggccgaggtttgatggggtctacagtgcctaaaagagccagatgacatcaaggcagcaagaaagaccactgtggaggctcttgcagtgagaaaaaaggagcagagaggaaatctgaatgactggacataaacctaaagtaaatctaactatacaaaaatatagggaaaaaccaaaataccattaaaagcatgttagaattctttattagagtaggcatcattcaggaagattctatcagttacagaaaaggaatcatctccatattctttgtccatctgtattttgacgtgatgactttctattttgctactcaataacttcaatattagaaatacaactttctgcaggagcacatagcacagtggtttaaacaggtcttggcactcagggaagactggaatgaaaacatataattttgaacagagattggagcatgaacagaaagtagcctgctgaaggtagagaggacaaaagagagaggaaggatattccaataaaggggacagatgcaaggagctccagatgtggggaagaattaggtgagtttgagaactggcatatacacatgcagtgtttctaaggtaaagagaaacgtaatagccaatatttattcaggatgtattatattccaggcactatgctacatgctttacaaaactaatcttgattaaggttcataacaattaagtaggtagttgtaccccctcttcctcatttagttattgttaccttcatcatcatattttgtattttgggaaatggatacacacaaggaatgaaagaacagattcacaagaaccatttaagaacctattgctgcagagtaggaagaactgaatttccagactatgccatcagtgattggaataaaaaagaatgaatggattcatgattcatttcaaaggtagaactgaaagaggttggatgcaaccaacttatttttaaagttcaagagaattgttgaatacgaggccaaagctttaactatggaaaacaagtagcaaattcctgccccgagatgggtcaacagaaggtggaaagtggggtttgggaggcatccaaaaatataaaaaaaataacctgtaaaatggggagccaagatttgcactgctcagtttgaggtagaacaggtagctggaaaaggagaatgggagctttgcagggagagatggccaaggacgtaagtttagatgacttttactttgaggtaaaagttggagtcctaggagtgattaaaatggtaaaaagagaaggaggcaaattaaatcaagtactgatagttgtggatcaaaaaggatccataccgttcatctgtaagtccaatctatcttgctttctgctcaaacattaacaatgccaagagccctggaatctaaagtacatattgcttttctgattttttgctccaaagagatcaagaagagcaaccactatctgagaactgctccttttccaaggcctttcctgatagaaacatttctaagccctgtgctctctatggacccttcagagatccataggctcatgtcattctatgatcatacccacggacctgattctcttaactatttatcagactaaatgtcagatcaggtggggacttgagatgtgggtgttttaatgttgttgaggtaaataaaatagtgacctcccactgaagggcactgggccttacagcttggtatcgttaaatgtgttcagtctgatttgttgaaatgttccatccctgctttgtcataaaagaagaaattatatatttaaaagggaatacagcaaatgtttaaaacatgttgccttttcttcaccatctgtcttttatttattaaattctgtccacttaaaattatcctctccccaaactgcaactgtcaaaatcccatctttcaacctctcatatcatctcatctcaaaaccccattagaaaattgttcccattcttcttaaagggaatgagttgtcaatcactctatgccctgggcatttatatctgctaaagcctttgctgtgttctcctatattttagggatgagtgcatgtgtttgtgcttttgtgtgtgtttgtgtgtgtgtgtgtgtgcatgtgtgtgtatacatgtgattggagtttgtgattggagttgctgaatgaagttgctgaaagagacatatggccatgtaagtaataacaagcagaagggctctatgaaaacacaaggcagaaatcattcaccatttcatgttgaaaataacactttcagcagaaaaatcctcatttgaaaatagcaacggtataattagccttcaactttacttccttattagtgatgcagttctccattccacacaatgcaacacattgtaataaatggatgttcatataatggattggaagagcatagaatccaaacatctggattcttccacacatggcgcattagctgtttctgcaaaagccaataggaattccatgttgatgcaattaaatgtgactggaataatacatgcttctcacatttttagttatacatatgtatatgtttggcatacaattcattatagtcacagaaattttaaaaaaagaaaagctttctacagccatgtctgttaacaattattgtgctacttcctggaagcagggaaaaagtgagtagtcctgggctgctggccacttcaccacattgccatagtgagagaatgcctagtccataaataaatttagtccagtattaggacttcaagcctgctctttatgatggcaaaaatatgcttcaatttgaaattgcccagaattgagtaaaacgagggttttatccaacatttcttaatttgcaagaacacaaaataggtgaatacttgtaattctttctctcgtcactctcattctaaacaggcttgcaaatggtgtggcctacactgagtcagaatgagaacacagctcattagtttcacagcactgggagagccagcctggaataaaatccaatagcaagggaatcgaggaagaagctgattttcacgctttcactttcattctctcatttccaattttgccctttatatgctaaagatacagtaatctatgcccaagttggaatgagatttccttcttacgtttctgtgcacatgagagcctcagaaagggagggcatcctctcattgctcttttataacttttacaaagggagaagattcacttaaccttcctttatttgattatctattatagaaaaatattgagttacataatctctatattgtctattacccgaaatctctcactttcattccaaactaagtaaatacgaagcaaaaaagtggtatgccgttactaatttaggttgcccaaactgtcccacagggaaacaaataagtatgttgtcattgatcagattttctgcatacagacactgagatctgtgcacaggaggtttctcagcatgtcttctcaggaatattgcttgtaagggagtgaagaagtaagacttttccaaaggaaaagttgaaatgtagtagagttcaatcaaaggctccagcccatcccacagagagtctgtagaactctgaatctgtggtgaccctctaaagatgtcccaaactgagacaaagggggccaggtgtttatatacccaacagactagacactggacacttgagggagtgttcttccatcaagggcaatttctacaggggaacacagctaggatccaacagcagccaacatattcagggttggagaacgagcaccttgactctgaaggcattaatctgggtgacacacaatagtatccactacagttcactctaatatacgatgcttggttctacttgattcttgtaaataagctctctcaatctagaaacatcctctttgggatcctagttggtctcattttcgaatgcaatttgttagaggaattttggtcctctccactagggctagtctcagggctgcaaatgatactcaacagtgcccacctttactccccattctatattccatacattctcagcttgcacctcttttggtctaggttgtctacctgttggggggacccaaatactcatctttgaggggtctgaggtcttagccaccatgcaattcttgggtcacagttgcaaaatttttgtttattaccatcctatcacaacagggaaggggagtactaagcaacacactagtaggtcagtggtgccaaacatgttcctccctgccccaagtgtggtacagctaccttttctacccctaatatttggggtcaactaccctgccacgatgtagtcatttcttcctactcatcctttgatataaggagcctgaccagacagcagtaatagcttaaagctcaacaggactttccttgtctcccctggtgaaagcatttccttttgagaataagtacttctagatccacaaaacctaaatttttttaaaaaaaaggaagctaaaactcccccaagtgtgctatgggtgtggtcgtaagctgggccactccaccctttagcttctagacacctactgggaaaataacatcagtttacagttattgatttagggtacttaacacctcctggtgtatgcaaccttgcagactatcaacaccaagttggcctatcatttgtaccataaaaaagatctgtttcatccttctttcaggttggcattttttggctagcaaaatatatccattccaattgtacatttggagacacagagaaatgaccactatctaaatctggggaatcagtggatccactgggagcctgtcctgagctagcactccatttattacttgctctcatatatgcccattctaacagtggcatatgattgtgcttcagttcctgagtatcaaggtcagctcagaccttatgtccaattatcctcaaaatgcctgcacattcctctttccccagtatatattacccaagtaattttcatatgctcctttggtcaaggacctgtgaaattactaccacataaacttgtcatgttgcaatgtccttctttctgaggaccaccatctcttcagtgagagacaacacaaatacattgacatatattatttgacttatgtcttccaaagggagtatttctagagaggataaagatcacccctatatacgttgtctaattttaatgtataataatttccatgccttccacaaataaaatagaatacagggaaatacttcttaaatgacagatggcaataataaaataaatcaagtgtatcatttgtactgagaataagagtaaaattatatatctatacactataattagctctacctatatatctacgtacttatgtaaagcatttcctgacagtaagatgtgcaactggtgttttagtgaacatgagagaaaaatatttttctaacctggtgcaagggtaacatcagtataacgactttcactttgtggcatccaaaactctctcgtcttaagcagttgccacgtgtccatatggcaagggcactactacacatacttttcacacgatgtttctggagagtccctgggagacaatagtccatgggtctctcaaatttctatatgttcaacctttcattccacattatttcttttcaaaaatatttatgtgatgagaagccttaaaagagagagataatgtcttgctctggaacaaagaatttatggcctcctactacatggagatgatgactccctccaaattaaaaagcatgcttgcttactctccagagtagtaaagataacgtctcctgccagagaaaagggcaggcatcttatttctcattataaaagatgtgagttccctaagttcagaattccttgactgtaatacaacccactaagcatacaagtatcacctgaaaatgtttgcatcttcctgtgggaattgagactgaggaaccagcacaaaaatgttaatactctggctactgctattgctgcaaataataaactgcctttgtttctgaccccaaagtcttgcatcttctgtcagcatccaggtatccacggcaggctgatttttacatttgcaaacagggtaaaaaaatctcacatccttcacagttctagacacttatgtatgttgttatgcaaagatatactttaaacagcagcaggagtgttataaacaccattctaggaaatactatgcaaataaagttataatcatccatattcatgtgttctagccagaaaagagaagtagtaagtcatgaagacattatctttcccaaattacataactattttgtgatggaaccaggagctaaaatgctgcttgggtaacttcactataataggctctattggtaaagtacttcttatctctatactttaaaggaaaatcttacggtgttttgtatgaggaactcagagtgaggacttttatatacattttgtttcccagtttctaaacctaaaaagagaatcagcattgttttattcctataggaatagcaattctgtattctacatttacactacaatttattaccaaacttctctgacatatggatctaacttattgtcttagcctgtgttcctcaaagaagactctgagataaaggtttgcataccaggagtttatatacaagtgggattccagagagctaaagggaagtccaggaacagtgaatccatgaaagaggaaaagccagtacaaggctgcattatcaaaatggccaactgctacaacagattgtgcccaaacccgcaggaccatctgatgagtcttacaaaatacatcttagaactaggagaaagcattgatcaatggactttcacccaccctattccatcagctctcacccactattgcatcagctctcaccccctattgcatcagctctcaccccctattgcatcagctgtcaccccctactgcatcagatctcctgcatttccaggttacacatgcgtgagaaccaagtgggttcccacagcaactgctgagaatccccatggcaggaagcaaaagagagatgtcaggtcttatctctacatagctggtgaaagcccagtatacccaggcaggatctgcaataatagatggggctgccagaattaagaatgagatccaagagttaactaaaactagcctccttggcacacattttctggtggtaaagacagtagcttctctattactgattaaaaaccagacacttttagtcttcaaccagacttctcacccactgaagaaattctattattctgatttttcacagtatccatttcttaaatcagagagggtatataacatgagagtagaaaagacagactctggaggtagaattatgtagagagaagctctgatgtaatttgagcaagttacataacctcttgatgcttctgtctgctcatccataacaagaaaaataataatcatatatgtgacaaaaattgtttataaggattaactatattaatacttacaaagtgtttagaaaagtgtccagcacacagagtccatgaatattcagtactacattatttgaacttcaacatcgatatttctcagcctaaagttaatgaatgacactttcagtaaaatgtattatttatttgcttgtaatgggatctaaaatggtggatggagtctattgaatttgagcactatatgtttccgattggttcataactttataaaaatggaatgaaaagagcattctcaaatataaacttactgagggtgcaagtctgccttattcatctctaaattccctagacccagtgaggtcccattttctccatgcttacctctacagcctcatcctttgcaacacatatttccaggtttcaaggttcatatggtttggctgtgtccccatccaaatctcatcttgaatttagcacccacaattctgtgtcatgggagggacccagtgggaagtaactgaatcataggggcaggtttttcctgtgctgtcctcatgatagtgaataagagtaagctttcctgcacaagttctctcttgcctgccaccatgtaagatgtccctttgctcttccttcattttccgccaagattgtgaggcctccccagccatgtggaactgtgaagtccattaaacatttttactttacaaattacccagtctcaggtatgtctttatcagcagtatgagagcaaactaatagaaagatgttcctggctcatgttggctttgcagctccttgatcacaccatgatctctcctgcttcatgactctcacaagttattccttttgtcttcagcaatactacttccgttatttgactaataattgtcagtcttcagggctcagattctccttctaatggtaagccttcctggattccccaagtccgagcaatgtttccttcctatgtgcacccaaggtgcccattatttccttgtcatagtacttactctccagtactgttattatctgtcctcatctgtttttctcactagatttaattgtgcaatgattgtgtcattttcatcatttagcactgtgactggcacaaagtgaacccttaataaatattagtggaatcatcaaatgaaagaatgaatgaacacatacataaatatgtgatcaaaggagggtatagaaggcaccagctaattgagttacatgcacacacacactcacaaaaatgacagctgacagcattcacttggttttctcatttttgtcctccactctactcacacatggctagagccctcctcctggaatgtgatagcaacatgtaatagtggccctttctctggactggtgcctgaccatgtaggggtctcaccgggtttccagctttgactgagggtcaggagcagagtccaactcattctccctcctaacaagcagaattatatcactccttgtgattgatccttttttaatctgaccccaactgctgtcttcatacttcttacgtaagatcaccaccactgtgtggtgcatgggagacaagagtacggagtcaaatccaaggatacaaacttgatcggtgcattgagtggagcctcacttcagtatcaccaaagacaaagtcattcactcctcatcgacagagtcaacccccttaattatttcagcagtcatttctcactagaatgtgattataaccccaagcagttcctcattatgcatgaacacagtggtaatgttttaaagtgaacacaaacatttttagggtctctatcttctttctcagtgccctgctcctcagtgccccagccttccccctggagcttctttccccagaagactgtctttaccagcccctgtggctctccagatgactcccaaatccaccaagatgagggtataaatctcaagacagtgttttcaaaagtgggatttttgcatctccaaaatctgcaacaactcaacgcggtgaaccagattgtcttggggtggggcccccgaatgtcattttacatgccccaagtgataaaaattatgcactctcaatattgagatccacagacttcactctttccaaatattttcaagtaaggagataaccttcaaactacaaagtaatgaagcctgatacgtatctgaactgaagaccctttgcttccccataagaatggttctgactcaggtaattaaccacatagcagttttagatgtgaagatcaagtggactaacggagccatatggaattgagatcacatcagtttaggaggttattgactctgacatctgacatcagtttaaatctgaagccagaatttatgagctgcttaaaggtatgcttttaacttctaggaactaaatgttctcatggtagcaagcacagttggaaatcttaagagacttagatttgctggcttgggcagtggatatgcatgattacctgaaatactggaaaatgtaagaggaatattagtgactctgaagaattcagtcaaagttgaagaatctggctatagattgcatttgagcagaatccagaactagtaaattggtgaacaatgccctacgcacaatgttactaaataaatagtaagcagacaatatttatttcacgagtaagaaaagtttaaagtaacctcagaacatttttctttaaaaccaagccattattgtcctgtaaagacaatttctttactagcagaaaccatatttatagtttgatttaggtcattgttacattatggtgaaattcctcttgagttaataccataaaaggtaatttaagatactgactctttccaaatagaatattagtttctcttgtaaccaaatacaatggtgatactctccaaaagcaatcctttgactagaagttggccctcacgttggggcaaaggttttaagcttgcttcgtgctaaataaaggcagtcaattccttctttttcttctatatggttgggcactgatactccagagggaaagtttcccataaaggcaaacataatatctcttcatctcctgatactccaaagagctccattccaaacaagctgatgttacagtctaaaactagactctgtcaatgtattgttgccatcactcatttcagttttgccaagaacttctaaagcggtgacagaccgaatcagtctaagaaaacccatatggacattctctcaaaagcatattatagtagctaatgaatactatatatctttagaaatgatacggtataaagtattagatatttcacagacctacacattgatataagtacacttttactcttcccagaatatgtttaattaaataataacaagaacaatgaaaacctgaatataaggtacattatgtcaaaagaaatgctgggctttgggactttaatttagattttttttttatttttagtgaagatctattaattgtgtacttgggccaaggagcatattaaatatcagtaatttaaagaataataaaagactgtcattaccacacataaattcacaactcaatagagagaagtgaacatattacaaataattataaaacagagtgtgtcacacctgtaatcccaacactttgggaggctgagacgggtggatcatctgaggtcaggagttcaagaccagcctgaccaagatggagaaagcccgagtctactaaaatacaaaattagctgggtgtggtggcgggcacctgtaatcccagctactcgggaggctgaggcaggagaatggcttgatcctgggaggtggaggttgcagtgaaccaagatcgtgccatgcattccagcctaggcaacagagtgagaccccatctcaaaagacaaacaaacaaacaaacaaaaaaaaaaacggcgtgttgtcacagtacaagaaagactttttacatgaagtctgggagttctcataaagatgacgcatgagcttagtcttcaacaatgagtgaaggaggtgggtaagcagtcacatggggaaaggagcaagtgtaaagtcagggctgcctgcaaacacagtgtctttggggactggatatgggctggaaggttcatcattatggcatagaatggattaaaaagaatatcaggaaataaggctaagaagccatgaaaaagtctccatcactcttcacaaaataatgttattttttgatagatgattttctaaagaaataacgtaaaatttcttaataaaagtaggcaatatgaaactgtccaccaaaataggaaatatttgtggaaaaagaatacaatcttatgaccacatacccatgtgaagctgaaaattccattttacagaatcataaacattgctttttgaagtcacagacaactctaataattcataattataaggaaactaaacagaaagatgcaaactaggtcaggaatgtagggcactaatcatctgatcctattctgtctgttttaaaatcctgaagactaattcttccaatatgtggaattacaagtttggcttttttctcatcttaatgcaaaagcaaaataaaaataaattcaaatctttagaactaaaagtgatgtgtgggttttggaccatttcagcaggaatggtagtttcttgtgctctgtcctcagtattatggagtagttcagtgcagtattcacagacattctggggaaaaacaatcttataataaagcagatgaatgagttgtgcttcagccactcctctgcctgtccttcccttacccaccacactttaaggcattatattactgcaaaagaagtttctaaaaaagcactctgccagatgactgaaaaacaatatatatgtttttaaaaaggaacatttactgaagtaaaaaaagatctataattcaaggagagtgagattttgaatcttaatcttccaaaatatgctctcattttgacttttttgcctttgtgactgtgttcccagtatccctacctttttttttttttttttgagacagagtcttgctctgtcacccaggctggagtgcagtggcaccatcttggctcactgcaacctctgcctcccaggttcaagggattctcctgcctcagcctcccgagtagctgggactataggcgcatgccaccacgcctggctaatttttgtattttcagtacagacagggttttatcaaattggccaggctggtctcaaactcctgatctcatgatccaccagcctcggcctcccagtgctgggattacaggcgtgagccactgcacctggccattcctaccatttttaaggatgttcattactgccatcatatgttgtgctggtcttacgcaatttgctttcatttaggacagtggattcaaacataaaaaaaattaattgcaacatggcatgaaaatgaaataaaactatatgttcttagataatttctgaaaaattcacatcatctttgcatgttttttgtctcctctacatgaacaaccataatctgtaagtgttgagtcttaaagtagagcaatttaaaaatgcgttattttggcaggcaaataaaaaacttttaaacatttttctctatatttcctaaaaaaaattatcttaactttctaatgggctatggagataataacaagaggtcccagcttctattaagatcctggaagggctatagccaaaacaaaccaaatcgtcttttctaaaactaaaacccaacttcagatcagctcagtcacagactgcttaaggctaatcttcacctactttaattctctgccaaaaagaaaaagtaaattcttgctggggggaaaatacattagcaagatccccaaataatccctaaaatatttcatttcaattatctgacattcaataaaaagttaccagacatacaaggaaaactgaccaaatgactaaattgagagaaaaatcagaatgaatgaagtccagaaagaagaactactagaaatagaccttacagtaattacaatacatctatttagtaaaacagatgataagatgtagaatttcatttcccaaacactggaatgtataataaagatttagttctagacaatggtaataaactaattgtaggactagccctagaaaaccatcctgaaaaatacaattactgaaaataacatatcaataggtgagtttaacaacagaccatctatgatagagaattaatgagctaggtgataggtaaaaataaaaagaagcaaaaaagtaatttatgatattggttcaagataattgctgagttgggggaggaggaatatagtgccgaaatgcaaacatcttctggtgttttggcaatgttctattacttgaaatgaatagcggttataagggaatattcaccttgtgaaaattcataaagttatgcaggtaaaaatgcataaaacttatcattcatgtacttttctatgtgtatatttgagtgaacaaaacatggacttttggcctgggagtaaaagcctcctgagctcaattatctttcctccattttttccagagaaatttttctattggtggggaaaatagcttctgttttcataatcacgcatgttgctgcaatgcagtgatgatgtgatcaagagcacctatctgctatgtaaccctgagtcatgagttcgtttgactaaccatatcagagaagctaatggggaaaactcaccctttcaacccagaacatacattgagtgcctttttgttactctctgcacatatcctgtatagcctcttctgagcagcattttgccatagagaaggatatatgaccttaggaggcgacggatcagtcttaaatctgctcttggcaatgaatacatttaacatctgagcatctaaaaccatggcatgggaaaggttttttccactcttaaaataggctgaatttatagtgatttgcttagtaaaactccatttactagacaaaaaaatcagtaaactattgctcatggaccaaacccagctcatatcttacaaatatacaaatgcagattataagccctgtgatccaaagatgttttttacattttttacagaagttttttaagaagtgctgtgagatagagattttttactaccaggtcctatacagaaaaagtttgtttactcttgcactggatctttgatcatttgcccaaagtacctaacaaaataaaataaactcctggttggaaaatactaaaatcttcagtaatggttaatttcatgtgtcaacatggctagaccacagtacccagatatttggttaaacaccggttttgatatttctgtgaaggtattttttagataagagtagaatttaaatcagtagactttgactaaagcaaattatcctccataatgtggtagacctcatctaaccatttgaaggccttaagagaaatgagactaaggtcccatgagagtgaattctgcctccagaatgtcttcaggctggagctgcaacatctgcccttccctatttctccagcctactggcctactccacggattttagacttgccagtcccacagttacattagccaattccttaaaataatgtaggaaaagtaggacagagatctaaattacagcattaggatgatagttaacaaaattacattgcatactagaaatttactaagagagtaattttagctagttttaccacacacacacagacatacatacaagggtaactctgtgagatgacgagtatgttaattttcttgtctctagtaatcatttcaatatgcatatcaaaacactatgttatatattttaaacataaatttaaaaaatactgtgcatgtatatctatagatagatgatatagatagacatacatatatcttgttttctcagttctattgcttctgtttctatatttctgttactctattggccctgtttctctggagaaccctaactcatacacctttgatagccaaactctggccaaattatcttctctcaatgacccaagagacaacatatatgagaagtagtaacctaaaagacattaaaagagtagaagagtcaagtaatactagtgttcttttgagaagaaaatgagctactgtgatggattcattgcaaaagaagaagagtggtttcaaatttctattcatctttatatacattttctttacaatgtgattttgaagctcctcttatctattttcccactccttgaatctaggctggccttgtgatgtatgctattccagctctagacctcgaaaagccttccttactttcattccgtcttttgttcctttgccttttccgtaagacaagttcaagctagccagctagagctgaaacacaatatagagtatagcctagtcatctcagcccctagctcaccagctaactgcaaaaacaatgaacagctgaactcaactcatattagcagaattgtccagcaaacagagatgcttaaaaaataataaagtattgttattctggaataataaaatgtgtaggagaccattgatttatactaagctcctatgctgggtccaacaaagcaaatcaatatggagtcattcatgttaaatgaaactaattaacttgagagtatacttatagctgagttgcagttagatacagctgctgaagtttagtcaattgtggatggccagtggatccaaataagacaaaaggccaagctataaacaattaaatatgttttttttattttgttttgttttgacagggtctcgctctgctacccaggctggagtacagtggtgtggtttcagctcactgcaacctctatctcctaggctcaagcaatcctctcacctcagcctcccctgtagctgaggctacaggcacaagccaacacatgtggctaatttagtttattttttgtaaagacaaggtcactgtgttgcccaggctggtctcgaactcctgggctcaagagatcctcccactttggcctccaaaagtactagaattacaggcatatgctaccgcacccagccaagttgttctttttgcagtacttttgttttctgttcataaatgctgtctgaccatgtagcaggcagaagttcttagaaactgttctggttctgaggactgcccgatttgagaattgttgcttttgaggatttttgcacaaataaacgctgataaattaaaacaatttatcagagttttttttaagttgagatttttttaacacccagcaaacacaggtgcatgagaattaataaattattgttattctaagtagcaagtttttgaggtggtttattatataacattattgtggtgatagaaaactgatatatcctaattgagaaactgagcctgttattgtgtcttttacccatctctgatcatctagcatctgagtatggatggtctagttcacatgaaggatgctaattgtgcttaatttcatacccacagagaatacacaaagaaaatcctgtttttgtaagtcttgtcagacataaagaataattttcctggacttctgacaaaaaccaaaccaatttcagattggacaattttttttctgatatagccagaattcaacatgaatgtggaaagaccaagtgataatttaatgcaacaaaaacaaaagctgtaaataaaggaagaacacaggatgaattatttgggtgtatatacaagatttctgatgaatagcttcgaacctttttgaggagattattaggcaagttgagatacattacctagggatcgagtagatttgtttctgttcatgagaaaaaactcataaataaaatgcaaagaactagaaaattatatgtttaattatcaaattcagtaaaagccattcaattattttttaagcaatcttaacattttggggaagcttagtctcaaatttttcagaaaatgcatcaaagatgaaacagcaattcaataacagcaaagagtaaatacatgttagtgcttattagtaagaatcggaaaacatatacatcatttgctacttaatgaagagtaaaaattgtagtccatgccgattcttcatgttgtttattcatacagaagtctcaacattaaaaaattcttccgaagaaaagacatagctaaaatcaaaggagtactgaacaaaattgagacacaaaaatccatatgaagaatcaacaaaaacaaaagttagatttttcaaagaataaacaggattgacagactgctgcttaaattgacaaagaaaaaaagactagggtgacattacaactgataccacaaaaatacaaaagatcctcagagactgttatgaacagaaatggataaatgcctggaaacacataacctccgaagattgaataaagactgaattgaagccatatacagaccaatattgaggtctgaaattcaatcagtaataaaaattctaccaaccaaaaaaaaagccccagactagatagattcacagccaaattctaccagatgcacaaagaagagttagtaataattctactaaaactactccaaaaacttgagcaggagggactcccctgtaattcattctatgaagccagcatcactccgataccaaaatctgacaaagatactacaaaaaagaaaactataggccaatattcctgatgaacaagacacaaaattcctcaaccaaatgctagcaaacattcagcaggacatcaaagaattaattcaccatgatcaactaggcttcattcttgggatgcaaggttggttcaacatctacaaatcaataaatgtgcttcaccacataaatataattaaaaccaaaaaccatatgatcatttcagtagacatggaaatgcttttgttaaaacccaacatcactccattatttttaaaaactctcaacaaactagacattgaaggaacatacctcaaataataagagtcatctatgacaaacccacaaccaacatcacactgaatagacaaaagctggaagcataccccttgagaactggaacaaacaaggatgtccactctcaccactcctattcaacatagtacctgaagtcccagccagagtaatcaggcaagataaagaaataaaaaggaatctaaacagaaagaaaagaagtcaaaatatctctctttgctgatgatatgattctatacctagaaaaccctaaatatcctgccaagaggctcctggaattgatacagtatttcagtaaagtttcaggacacaaagttgatgtacaaaaattagtaacaattcaatacccaaaaaacattcaagctgagagccaaataaaaaatacaaccccatttacaatagccacaaaaaaataaaatacataggaatatacctaaccaaggaggtgaaagatgtctacaaggagagttatataacaccgctgaaagaaattatagatgacacaaacaagtggaaaaacattccatgataatatactggaagatgtaatatcattaaaatgcccatactaaccaaagcaatctacagaatgaatattatttctctcaaactaccaatatcatttttcacagaattagaaaaaaaaaaactattttaaaatacatttggaaccaaaaaagagccttaatagccaaagcaatcctaaacaaaaagaacaaacctggaagcataacgttacctaacttcaaactatactaaaacactacagtaaccaaacagcaaggtactggtacaaaaagagacacataaaccaatggaacagaatacagtacccagaaataaagcttcatacctatagccatctgatttttgacaaagtccacaaaaataagcaatggagaaaggagtccctattcaataattgctgctgggacagctgactagccatatgcaggtgaagctggacccttaccattcaccatatacaaaaattaatgctaaaaaatttaatgtgagacctcatatcttgtgtaccccatatatatttatataatatatattatatattaatatataatatatactatatataatctcaatgaggtgtacatatataaatatataatatatattatattacatattatatataatgtatataaaatataatatatattatgtaatacatataatctatatattatgtacccacaaaaattaaaaattaaaacatttcataatacaaaaaaatgtaggaccttaaactgtaagaatcctggaagaagaaaagctaggaaacactattctggacattagccttaggaaagaattttttactaagtcctcaaaagcaattgcaacaaaaacaaaattggacaattgggacctaaactaaagagtttccgtggctgggcacggtggctcacgtctgtaatcccagcactttgggaggccgaggtgggcagatcacctgaggtcaggagttcgaggccagcctggccaatatggtgaaaccccatctctgctaaaaatacaaaaattagccaggcatggtggcaggcacctgtaatcccagctactcaggaagctgaggcaggaaaatcgcttgaacccaggaggcggaggttgcaaggagccaagattgtgccattgcactctagcctgggggacaacagggagacttcacctcaaaaaaaaaaaaaaaaagagtttctgcacagcaaaagaaactattaacagaatgaacagacaaactacacagtgggagaaaatattcccaaactatgcatctgacaaaggtctaatattcagaatctataaggaacttaaacaattgaacaagcaaaaaacaaataaccctatcaaaacctggtcaaaagacatgaacagatgtacagacacttctcaaaagaaaacatacaagcagccaacaaacatatgaaaaacagagaaagtcaaaccaaaaccacaatgagataccatctcacacgagtcagaatggctattattgaaaagtcgaaacagcagatgctggtaaggctgtgaagaaaagggagtgcttatacactgtcagtgggaatgtaaattagttcagccactgtggaaagcagtctggagatttctcaaagaacttaaaatagcagtaccattacacccagcattcccactactgggtatatacccaaaagaaaaagtattctaccaaaaagacacatgcacttgtatgtttattgcaggactattcacaatagcaaagacatggaatccacataaggtacccatcaatggtggatttgataaagaaaagatggcaacaaaagacactgggaactactagagggaagagagatggaggatgacaagggctgaaaaactaactattgggtactatcctcgttacctgggtaatgatggtgtcatttgtaccccaaacgtcagcatcacacaatatactcatgtaacaaaccttcacaggtacctctgaatctaaaataaaagttgaagtcatttttttattctgttaagtatatattatattacagttgtttttgaaggttttttaactagactacatacacttcttcatgaacaacacaaatgcaagagattaaaaatgtgtttatttattcagggctaacagaaataatgtgtaacctcaatatacctttatcctgatgaattgagtttgggagctaagttatctggacaagggtctttaataatataaaataataagtgtgtgttttcaagcaaaacaggtaacaattcccacgcatttatctaatgaaaattataactcatcaactggaaaagaagaaatacttttacctagatatagtcagaatgaatacgtatttttaaaattttcaatttaatttgctatagtagcattgtttattgctggaaaagttgcttgggaaatattttgatcacatttctccaaaatgtaaatctagccatattttattgcacaactccaaaactaaacctcatcttttttatgagttaagtaaccaatacaaaatatcagagcctcctgagtttctcatactttaaaaaaaatagaagcagggagaaaaaaatgccttttatagaatttcagaacaacctcatacattctaacttttatgacaacctaagattttcagatttaaaaggggaaattaaagatggtttcacatttcatcaacagtgtgggaaataaacattcaagaaattacttttgcatcatgtgtcataattcatgtgaccttggctcaaggcaagcttgtactacagtgttgagctgtcagagagagaggggagaacagcagggctgaggctgagagagattgtcttagctatgggctgactgcagagaggtaccgaacagtctaacagtcacactgttatggggaagagagggcttcagtttgatctgcactgatgttatcctccaagacagcatggtctgctgagtgtgtatatttatagaactatttgcctgtgggttcatgcctggctctccttcctctcctttagccccaacaaaccaactctgttctgtaacatagcaggtggggtccaccctgcagtctgcatatcccagatctcagtatttgactttctagcttcccattgagttcagccaatagggagaaccctcgggagatgtgatgatggagggaaggaagaagcttgggtaatctctctgttcccctctgcattaggcagagtatccggaaagggctataacttcaccaagctcccgtgccctctgcactaaaactgctgtggttctagcttctattaggccactctattcctggagtctggcaaaactgccttctccagtcctgtaataactaatgtattggttagctccccattccttttggtatctcagctcttccgccatctatgtgatcaatttctacaaattaatcgttcttggttttaatatttggaattgtttccatttgttctgactgatacaatgagaatttatctgtcccttggatttcatgggtagaggcagtaattccacttggagtgggtgggctctttcatagtggttcatgagggctatggactataaagacaggatgtatgccccatcctcatgcggaaagggattgtaagagatgtttaacagtcccagaaaggtgggctgggaatcacagcagatacacagtctaaaagaaggatcaagaatacactcaggttccaaggctgaggcccattcacacgacctataactgtagcaggagtggttgaggaggggggggtggaaggaaagtctgtaattcaggggatatatgggctcactctaggcacacaaaatattttatttaaggaagcaagtctcacaccagtcccaaatcatgcatggtgatagccttcccaattcttcccagattagtgaaaattggcccagggactgggtgaagctgagctcatcaaatttaagggtttgggaattcaccttcaggtaaaactgaaataaacatcttttgaaagatcccagcaaaattattgctagtgataaaaccagcttccaagatttggtaatgttttctattcttctaatcactcttctactcttgtaattctattcagaccatttgtcctgttttctctttcaaaataccatttatcttcaatgtcaataatcctttctagaatcttgctggtcaaagtgtggtgcaaagatgggcagccttggtatcatctggcagcttattaaaaattcagaatctcaggctccaccttaggtttactgaattagaatctgcatttgaacaagatgcccaggggattcatgcatacattaaagttttagaagcactttaggagaaagtaatttaattcaagtagcaactaatatgattaaaacactcttagcatagtattagagcacagagaagaatttttttccttaaatattacagtgaaccataaaatacacacaaacaaaaaagttaatgtgagttcaggattttatttttttacttatatactgcatgaaaccaacgagccctagatgatttatttaacccttttctgtttattctacatgacaaatattaatataagggctgttggcataaaatgagaggcagcagcaagaatgaagactggtcaaagggacaaatcataggactgaacatcaaagaaccttaattttcttcccatgtttatgacctctctgctatgtgcttggatgcataatgcctcttcccttgctaaaaatgtttattccactggaagtttatcgtataatcagaatgaataatggtcatactatgcaaattttatataatattagagagtcttgtagaattttgctcaaaatgctaataccaaattacagatttaccaagatatttggaatagaaagtattaaagtggttaaaggctggtgggggaaaaagagtagagctttccaggttaaaaaataaaataaaaaaataagttttgtttttatgtcaaagtctttttgaaaattatttttctttttttggagagaggaggcatcttcctaataacaccagaaaatatattaagtatgtaaagagagaaaagctgtctacctaacatcctgaaaatactgagtgattgaagataagaagacaaaggagtcgtaaaagctctggaaaacattgagggaaagtaatcaataaactttctaccatcaagattttaaagtaaagctgtgtattatgtctgctttaagttgtatgactccaagtccccagtagagaggtaaccattacattacagtttcctttgattccttaccacttcacacgattttttggtaaaattccctatgtagtggccttaaaaaatattatttagtatatttaaaatttgtatatgttataatatagcctaagtttttaaaatatgagtgtatttatgactcatttttattttaagatgtaagtacatattcctaaatctgatatagggttctagttgcactgactgttgaaaactgacatctgagttggaaaggagagaaatgtttaaaatagagacatgttgaactcaccaaataaggagggaaagaagagagaagaagaagaaaagaaataagaatgtatgtttctgcaagttcaacaattacgtgtgttaacgcaggagcttaaagtaggagctctggagtacacagactcagagcaccatgaacatagttgggaggcacagcaggttaacagagatacggagtgaagagatagctggaggatgcatggcctataggatctattgcttggaagaagtcaggagggcacaagacaagctgagactgcagtgaaagacctgaattttccaccttgagaggatgagctatagtgaagtgccttcatttgcccaagccctcaaagctaactcagaagttaactccttaatacagttttctttaatgtccagattcaagacaccctttgctctttactcttccccagtacttttcctctgcatactcttataaatatggtagccatgaatctcattctgcaaacccaatttttttaactttaaaatttttaggctttaaatccagcattttaaaaacttttgatctaatttaatctgtctcagagtccctaaaatccacagagattatgagaatgtcaatcccaaacaaccctgaagccactactgaggtaggagaccagctggacttaattccaggttctgatgggatgaaatgaaaaaaccaccaagaaccagcagatggccaagaaagtgatccctagctggcctcattgctcattagcatgagacactcccaccagtgccatgacagtttgcaaatgccactgcaaccacctggaagctactgtccctttccatgacaatgaccaggaggttaccacctctttgctaaaaagttctgtataacctgaccctcaatttgcattacctcaccccttgatttgcatgtaactgaaagtgcacatacgtgactataaatacagtttcctacagccaacaagcacagctcatggctctaggcacaatgtctatgagttctggtctgcaaggaacagctccagttcaataaaagatcactatccagcaccactggtttacccttgaattctttcctgaataaaggcaagagccctctcaggctaagccccagtttggaggcttgtctgtcgacctacatcaatataagtcaagagccctctcaggctaagccccagtttgagggtttatctgtccacttgcatctctaccattgcagggcagatccagaatccaagatgctaatgggtttccctaaaatggaaaaggaggctcttaccatctgcccattatagccatgactgaaatttatggtttccacttggtggtggtatagtgactcacttatttcaatccctgtttgagattcagcctctagggtatgctacctaaggacaataccaactagaaagtcttgggtccatgctctctctggaaaccactactctacagtttctttcaattcttggcaatctccctaccctctactcccactcactgtcaaaagtctcttcacttatctacccctccccattctctgttcaggatacctatcacaatctcttaggaggactttggcttttgcaaaagacaggaagggaaatatggtgaaggcaacttctgcttttgttcccattatatacatctccctttagtgaaaaaaagtctgtcaacgtgaaaggggcaaaaggaaaaacaaactaattaatatgttagctttgtagtctgatttattcttcacctaaagactctctattgtcatcccagagagataatttactctccatctagaggccatcccaaacaagatggaaccatgtttgtatcctgaatttgggttctttgggatattagtcctagcattcaaagattagctgactcagttttcctgaatctctccaattactacctaggtaagcctggctactaggcaagttttctgcttcctaaagggcactatcttcttttggagaaatttcttccaatacacactggctacattccaaccagagaaataatttaattattaaatcaaaaaatctttattgagtgtttactacatgccagacactgctctaagcactgaaaataagacagtgatcaaggcaaacaaaaatctctaccttcatggagcttacatactagtgataggggcagaccacaggggcaaaaaaataaaattactaagataaataacatgtcaaataagaataaattcttagggggaaatttaatcaggaaaaggatctccttaaaccatcatttggaaagggcaaggggtgcaatggggaggaagaaagtggaagaaagtgtgaaaaaatttaaattgggttgccaaaaaaggtgtcagccccagagagtccagatatgtctttggtgtttttgcataattgcataaagtagagggtgggaggtggtgaggtttaaaagtagccaggtgtagagtcaactctaacaggtggtgagctggttctccacctgactccattttcatctcttcaccaatgagctaagactctctctccaatttcctctaccaaaaaattggaaggccatgccatgctcactagagtaagagctgttgggtactcatgatgattcatgcaacaggtgtcaaccatcaggttgagaatccagcccctagctacacccatccttggtcttgacattttgaaacaagctgaaaaggtactgactgagctgagactcctgtgggatcagagcaactccactatgtgatccctttttggtttcctgagacacctcaccagtattttatttctacattactttttgtggtttacccttgtgggtgctatcttctagcaaatgtaaggcctaaattctaatattctccctctgaaactaagcagggctctctgtaggcctagtatgggttctggtcttcactgagacagcatattcccagatgcactccagatccatcagtggctgtgtgatggttcactttacgtgtcaacttgggctgggccatagtgcccagacagttggtcaaacttattctggatgtttccatgagggtattttttggctgagatcaatacttaaatgggtggacattgaataacaagtatcctccataatgtgggtgggcctcatccaatcagttgaaggccttaacaggacaaatgctgacctttcctgagctaaaaagaattctgccagcagacagaattacctttgtctttggacttaggcagcgttcttccctgggtctgcagcctgccagcttaccctgaagattttagacttaccaagctttcacaatcacatgaaaaaaattccttgaataaatccttccccctctctctctctctctatatatatatatatatatatttacacatgtacagttggttctatctgtctggagaaccctgactaaggcaggcatataaagtttatttggtggttcttcatttagacagcttttgtgattgactatgaaagagttctccccaaaaccttgcaaagcagtagtgtagacttttcacagctgtggtattccccatttgtcactgcaaagagccatctgtttctagctttctggcttaaagagaggtgcaaccaattctatttctttctcctcttttatcagtttcaatagtattcaataaatcagtctagcacacaaaaacatgtgttttcatcttcatcactagagtataaacccctcaagggcacgaactaatatataccaccactgtagcacctctggggctacctcacacgttgtagatgctccataaggaaaaaagacaaggttgagcaaattgtactgagaaactggatgagaatggttggcctaattttaccccaagaattaacccaagcatgcaggtgtatctggtttaattttgcataccttccgtgaaaaatgacttaccaagcagaacttcacacattgcggttatgagaatgcattttttcattggctccagttcacatggtttaaatagcatttcatttcactatgagctttattttaatttgaaacttcacaaatacgaaaccatttgaatcaaaccagatgcaagcactcagaatatcctgctcgttcctgtcagcctgcttcacttgagaaacaattcaatttctcttgacttcaagcaaacccttattgagcaggcctctttttctctaattggcttttagacttctccaccctttactagctggtttgtggaaaaaagcaagtaatcttcaaaaaaaaagttacaccttttttccttaaaaacaagttattttgtttggcaattataaaataatacagaaatatgagtatgcatattgcatctatgtgttttgcttgcatattcaactcatatacacacattatccttttagttcactgtagttttatatgaacctataataataagccagttcaggaatgatgcctgccttattgttaacaaaaatatgaggataaagttttccgctatcacatccactactgtttgggtacataagcttccagtgtagttggcatatgagaggtgagtaatacttgttccagattcaacttggaagcccgacctaggctaagcattgtgtattttcttacttttgcagcataagacttacacatctaaaaaacaaatagatttgcaactatcacatactcccctttaccaatgtccattttcattcaaactctactttgaaaaatctatctctaaaacaaatggcaaagcaatgagcattactagactagtaacaagcaatactagactagtaacaagcaatgctagactagtaacaagtaaggccatttttttaacccaaacaccaaagcaaatgacccctattacagtgaagactgttggattcattttagaagtccccacatttcaataatatatctttatacacaaacaaccaaaatatggaaatgtctttgtatagtacccacttaggagaaattggttttttaaaaaaacagaaatgcaacaaggaagaatgatgatatacattaaaatatagagacatatgagaaaccagtatttttctttaaaatctaggatgggaaattacacagaaaatacatgaaatgcagtccctttgtccttttggcttttctgaatcatcatcatcgtggtttaaggagaagaagaggaggtagaagtttgatgcctgaaaggtgacttggtagccctggaaggcccactcggtgacccacttaactaatgttgacagttccaatcggatattcagaatacagacttacactacaaagaatgattacatgtactcaatgtctactacatgtggcaggtactttggaagccttactgatcatctcagtcatgagtatcatcatactcctgcttcttatgaggaaacagaagttgagcagaagcaagtacgttgcccccaaaatcccagaactaataagtgacaagtcaagatctgaatttcagaactggcttactcaaaagtcaatgctttttctacttttatactctagaagaaaagttcttttttaaaaatcctccttcactgcctctttcttaatgattccagatgtctgctttacttcctggcctgttataaagactcttagtttctcatgtttcaattgttgatcaaaatagttaactctattcagaaaaaaaaaaaaaacagagaagaaaaaagaaagtcttacacattctaaaaagaaaggaaatgggtctgttctctgttacaggttataggttgaatggtgggtccccaaaaagatatgttgaaatccttgaaatcttaaccttcagtccttcagcatgtgaccttatttgcaaatagggtctttacagagacaagaaagttatgattaggtctcttgtatttggacacagagacagacacacacagagagaagactgtgagtgtgaattgtgaatgtgaagacacacagggagaagacagacatgtgactggagtgaggcatctataagccaggggctccaaggattgccagtgaccagcagaatctaggaaaaggcaggaaggctttccctacaggtttcagagggagcatgctcctacagacgccttgactttggacctctagcctctggatcaataaatttgttttcagtcacccagtttgtactactttgcaatggcagccctaggaaactagtacagctttcaaagaatgaaaataaagcactgtaaagcctcgccactcacagtgtggtcctggcaccagcagcatctgcacccgctgggaacacggtggggtagaggccagatctagtgactcagagctacttttcaccagcctctccaggtgattcgtgtaccttcaaatagagaagagagattgcaaatggaatgcacagtaaacttaacttgtagctcggataaaaacataaaagtacttcccttttgaaatcctgtttcgggggctggaggctccagaaggtgcatagaagagggaaaaatgtgtgcctctaggcagaaagtgaatgtgttcaccagctaagactaaggatatactgaagaaatatgcaggtacctggaatggctaagaaacaggcatcagaaggagactcaggatggctttaggaaagaaaagctaaaagtggtttcaaaaccaaagggaatctaagagacacgtgtgtgacaaaggacagtagcagaagtggtgtgggcaggcccaggagaagggagaagtattccctgcatccttctttggtggctgaataaccaggggcctccagggagggctgggggcagagcaaaactcttggtcataacatgcctgttacaaagccagtttagtaattcctattaagtaaattttgtcctattatattttttttccaaaagtattgagttaggagtgcttacaaaggggaagtcctaaaccatatcgagcttgtcctcataacatgcctcttacaaagccagtttggtaattcctattaagtaaattttgtcctaatttttttttccaaaagtattgagttaggagtgcttacaaaggggaagtcctaaaccatgacaagcttgtcctccaggggcctgaggtcaggaggtcagatatccgtatctttttcttttcccatgtatggccatcacattccaaaagtcaatataatagagtaacaagagaaaatctgaatctttgcctggaaataattcagatctctagtttttctccaaattcttaagtttaaatctctcaaacaataaaacaatgcaatgagtcatatggaaccctttattaaactctgacaaatcaaatcatcaatccattttaaattccacacttttcaactttgaagtaattaaaatattcccttgagatgaaagatttgaaaacataattcaataggaaacttgtgacagaaaaaaaggatctgttttatagattaggtgattgctgaaaacagttttctaaaattattgcatatgcatttatttggaattgttgcgtcttggaatcacaaagtggggtggcccaaaaaaatctgtctaaatgtgaagatcagcattctaaatagccctactttgagagtaaatgagattggcacatcaacactcaataactataacatggattgcaaaatactgaaagacagaaaagaaaaaccctctggaaatgctatcttccaccaccctctcctacacatatacagacaagatgttttccattttttttaaatacaggaaacatttgtgggacaaatgtagaataggaagaattgaatcaggctccgaagtcagctaaacttgaaataaatcagaatttaaggtcacagatacctttgccctgtttcttcctgtctgcttgtcatttctcaaagcctaatacaaaaactacagccttccatgacctttacttcttctgaattgcaattttattgattgttggaaccaatcattgtttccttttattgatagacattttaattcatatacatatatgttttggagaaaagaagataaatgtcttcaaacattgggtctggatttcccatattaaaactagattgacggctgggcgcggtggctcacgcctgtaatcccagcactttgggaggccaaggcgggcggatcacgaagtcaggagattgagaccatcctggctaacaccgtgaaaccccgtctctactaaaaatacaaaaagttagccgggcgtggtagtgggcgcctgtagtcccagctactcaggaggctgaggcaggagaatggcgtgaactcgggaggcagagctcgcagtgagccgagatcacaccaccgcactccagcctgggcaacagagtgagactccgtcacaaaaaaaaaaaaaaaaaaacacactagattgacttctgttattattcgaaagaattcaattcaaatagtaagagaagattagattaaataacgcattttaaatgaaagactgtggctgaaatgattgacaagaatcaatcacatgtcaattcatgcagccagtctgttaaggtgtctctttgtacatgacagaattcctccctagcaactattgggactaaaatcagtttcaagatggccactgtcttcccctcaaagctttattgtcaagagtttgaccacagctcatgtgtgtactctactgttgagatttcatatcccagggaaacccagattcaatattgaagaaactttctcagaaaggcagagttgaacccagtatgtgttataaaacaagcttccaagctgccaaccttcccttggctaaatgttcttacataactgtgggtttatgacttgacaccatctcattctatgctctctagacaattggaataaagcagggaaaattacgtcagacaaaaccatatgatgtacttacttcatatgtcatagtgttaaagtagacatcccactctaaatggactcttcagagcagcctggaacatcaccacctccccttcattatactgtgcagtgcaccattattattaagccagtttgttctctttgcctcccttcctgtttccctccctcccttttcgtgaagcaaaattatacacgtaacactttcacaaatgttaaaaacagagctatgggttttgtgatttttctggcattgcttcataccaccaatcattccttctctccaaacttgatgaaatcataatgattcataagctttggttggaatggttgtatgatatactcttgtagaggcaataagcctattacattactcagataaatcggtttaaaaataatagaatagttgcacccttaagtaaatctaatgtgtcagaggctcatacaaaattttggtcatatttgacataattaaaattaagccagcatgaatgcattgagcttaagaagtaacagtctctctgtccctggaggtgaacaagaagaattagatgaggaatctatcaagcctgttttgaataagaggtgacactctaaacttggcatcctcaaatttcatgaagcccagattctaacacagagaataaaacaactagaaagaaagattgaaaggtgagaaatccgaagtaaaataatttaattttaaggggtcagattaaaaaaatgcatatcaaaggatcaaaaggaaagaaaatacatccaggtgtggtggctcatgtctataatactagcactttgggaggccgaggcaggtggatcacttgaggccaggagatcgagaccagcctggtcaacatggtgaaaccccatctcaactaaaaatacaaaaattagctaggtgtggtcgtgcatgcctgttgtcccagctagtcaggaggctgaggcaggagaatctctgtaacccgggaggtggaggctggtgtgagctgagatcatgccactgtactccaggctgggtgaccgagtgaaaataaataaataaataaataaataaaacatgttgacccaagtccatggccaaaatgaggcagagaattatattctgaggtgaaagaaaacttagaagttacataattcagtccttacattgcacagatagaaaactcaagcaaggcaaacacaatgtcttacctgaggacatcagttatgagtaagaacagagatgcaacccagagcatgccaatcccagtataattcactctctaccacatgaaggaagattcccacacatcgataaagttttccaaacatcatggacagatggcacagttatagaaaggtaatgattattcagtttcatgaatgctatcagcatctttctatttaattggaaatgtcctaaaatttattaattaaccctttcaccaagtccattccatattttcagagcatatatttcaactctactgtttacagaatttttttattgttttgtttgtttttgtttttgcttttttgagatggagtcctgctctgttgcccaggctagaatgtaatggcataatctcagctcactgcaacctccacctcttgggttcaagcaattctcctccctcagcctcctgtgtagctgggattacagatgtgcaccaccatgcccagctaattttttatatttttttagtagagacggggtttcaccatgttgaccaggctggtctcaaactcctgactgatccacccaccccggcctcccaaagtgctgggattacaggcgtgagccactccacctggcctacagaaagtttttctaatgaagttttcctatcacatacctatcgagtttgaacaccattttttgtcatccaccaaaaagtgaaacagaaaaacatgttgttttcactatgtcgagatggtgccaccaacaaaaggaatcacaattccggtttcttcctaacaacactcagtgtctactgttgattattcattacttggcacaaaagaaacatgcaacgtttcttctcactctcaagaataaatagctttgagcagagaacacagtgtatcgtacaaaatgtcactacattctaactggaaaccatgtgatcccgacatttgctgctgtcccatcgtctctttgctagtgccatgtccaaaatttacaatctgcggagaatatttagagtccagaaatttattccagtgacactctggtggtgagattctagagttctcacaaaacgaaatttgtcatcattggaaagcttgccagcacccagaatgcaagtatccatgcaactatgagaaggaacatagggttggtcatagggcagcaaggacaagatcctaggaatgtaagaactacaaaaataaacgaaacccataatctatttgcctacataccacccttctcactgtagcaccaaatagagtaagagaattgtgaataaggagatgagtaaacttggcacaagtaaacatttgattcttgcccttctcactgcttgatgcccaggccagttggccaagctcagaaatatttccttctgcacctaccattttgcccatcttttgttccttttcctacagagcagcagatctccttgttaggagaaggaattcccttaggagacttcatctgaaaacacaagtggcttggggtgacgcttagcatgctcacccagccagaggcattttatatcttaaaatgagaacttgttgatctataggaatgaattgctaatgctgagattttggctgcacatcttggggttcaaaaggcctctcagcactttgtaaattttgttagatgagcttccactcttagctctagcgtggagccaaaaagtagaaatctcacgactttagattcaggacactgtggggctggttctggttcctcagagtgaaagtcaagcaaatcaccacctctccttcatttaagaaataagattcatctaagaaataagatttagaatacctacctgaaaacccattcttggagattgttaggctaatatgtatgtatttttaaaacattaaagttatcaaaaattattatttttttcacggatgtcaatcataagacaaatacctcctaatgattccagctttccagaggattcttctaaagtcggtgttggcaaacttttttctgcaaaaatcactttggatttgcagactagtctctgtaaactataaaacttctgttgtaaggagaaagcagccataggcaatatgtaatggaataagcttggctacatttggcccacaggtcctagattgccaatccctgatctgtagaacaaactaccaaaatagggatatacattcattagaactacggagcagctgagacatctattttgaaactagtcattcattttttccacctattagaacaaaaaatatacctcccagtacctgtttccttgacttaaccctagctaccacacaaactggttgcccaacaagcagcccataaaacaaacagtacaaataatatatattcttaaatgaatgccatatattctccaccccatgatcctacaagattgctggcaggctcgagtggtgccaaaatgcccgtggtagacctgctggagaaatggcttcctcattgactcccctcgcatcctctctcaggttcagtgccctcatagatttggacaaagtgtgatagaattggttgtcatagtagctgagtgtttctccagattttctctggaagcgtaagccaggattctcaggagtgctgtttgtttccttgacttgggaggagggattttccctccctcatgcctaggcatcagtctgcacgcccccaggcttacgcacagcatccaacatgtgggtgaaaggaggctgagagtgggaggacatggaatctgagcaatgaactgtgtcgcctcgagctgctctctttgttggcattcagtgggaaggctgatgctaggaggggcaacttcatcaaaatattgcatgctcctctaagggcaggggcaggggctatatccctaggagctaggttagtgactggctcaatacatatttgctgaatgaatgaataatggaaagaagcaatcaatcaatcaatgaacaaatgcaggaatagtccagactcagagagacagtgagttgaataccttgaagggcatttttgttatgcataggcatgatttttgacagactaattcaacacatctgcttgttggtttgctgtttgggaatgagattttgaaaaaggctgagtataagagatagtatgaattatactctctttctgtgattattctctctgtgattgcactattaacccaagccaataaatagtaaccttctaatttattcattattcctactgttgaaattatgacaagactccaacataacagcttctctctatcatcattttggacaagctgaacattctttagaagcatatgggtatgtgagtgtgggcctgtggtgcgtggtgttggggaaggatcctggaggcctggaaaaagtaatactctcaaactcaaaaagcaaattgcacctatttcagcaaattggaaattgatggtgtgtaactctgaaggcccagcagtagctattatttccatccaggctattattaactggtaatattttctctagtaaacattcaattactatagcaacaggagccatgtcacatggaccaaaaagctccctgactttgccagagaaatggatggtgtttcgaaggcattttagaaaatggaaagaggcctgccaaagacgatattttttaagtactacactgaatttttacttgagataaaagaaagaagaaaactctgataaagtggaaactgaagacttcttataacccctgcttctatatactgtatctagtgtcttcccagcaagcatagaagttcctttcctcccatctaagccaaatgctccactgtgttctcagtgagatcccatgcctccattgcaggtactgattcacaatgccaagtatgacttctaaatcctctagcttcaatttcttccccctctacatctccccaacaatacacatctgtattgatatgcagcatgcatataaacaaataaacaaatcataagaatacatacagctcaataaactatttcaaagtaaacgcacctatgtaaccagtacatggttaaaaaattgagtgtgacaacacacagaaagtcttcctatagcctatataatagtcttctcacactaaaggaaaccactatgaattagttttctttgtgtatgaaatgtatataaatagacttgtatagtctgtacttagtctagcttcatccatccaaagatttagtcaatagaatcatccatgtcattgcacgcaatagaaggcagttgtttcattgctgtgttagcttcctagggcttctgtcatagttctgcaaactgagtggcttacaaaacagagatgtattttcttacagttctaaaccttcaattaccatatcaacaggagtcaccttggtagctagaggtctgagatcaggctgtcagcagagtgggtttcttctgaggggtaatgatgttaagagcactacatgatcaacttttctaaagtctccatgtcccagttttcccatctctaaaattggagatcataatatctcctcagcagatagctttgcaactgcttttaggagtaaatgagattatccgtgtctggcacacattaataaaacaaataattattgttgctgttattatgttgtcattacaattttttaacaaggccccatctcaggtaccaaatgcaaaataccagcagtttataagaagccaattataaagtgctgaaattaaaaatcacattgcagtatcacggaaaacaataatccttaagttgtaggccacaagcaaacactaaatgtttttgttcctttttatatcaacctgtcctttaagaaaaaggctaagaacggccgggcgtggtggctcacgcctgtaacctcagcactttgggaggccgaggtgggtggatcatgaggtcaggagatcaagaccatcctgctaacactgtgaaaccctatctctactaaaaatacaaaaaattagccaggcgtggtggtgggtgcctgtagtcccagctactcaggaggctgaggcaggagaatggcgtgaacctgggaggtggagcctgcagtgagcggagatcatgccactgcactccagcctgggtgacagagcaagactctgtctcaaaaaaaaaaaaaaaaaaaaaaaggctaagaaaagacttacttcatcttcttctgcaaaacccttctgagctaggtatacaggttattatgttgctttcgcaactgaagaaactgggtcacatggaagttcagtgatttgagtgtcaatttggagtctgtggaagatcagctgctactagaatccattctttccctacaagtgtggttcacagatctaaagtaaactgactttactcctttctttgatgattatacacagcttgattggaaagttacactataatttcacagtgattacatgcccttgaatatcattttgtaagtaaatgttttgaaaccaaacataatcactgttatacaaccataaccctttttcttatgccatattctccaccaagaatttaaccaagctaaagttacacttcagactctgagtagctggctctgggctctactctgtgtttctggaactccaattccactgggctatctggagatgaattactgctctttggcttcggggataacctttatcctttcaactgcagggcacgtacacaaaaagctgcactgtgctgtcaacatgagtgctgtcaaatatagtatgttaagatgaatcagaacagaggctttgcgtagtaagacattcaaaagtgaaatagcctatccagacgcctggaaacatactcctacaatctggacatcatgaagctcctcctctcttttaagaaatttcctccagcctgggcgacatagcaagaatgtctacaaaaaaacaaacaaacaaaatcagccaggcatggtggtacatgtctgtactcccagctacttggggggctgaggcaggagcatcacttgagcccaggagttcgagcttacagtaagtcatcatcacgagccatggcacttcagcctgggagacagagtctcactctgtctcaaaaaataaataagtaaaaataaataaataaataaacttcctaattgcttggccagtttgtctccagaaactccagaaagttgtctccaaattcaagtgttctccactctaggttagtaactcagagatacccctacctagtaactcttgagggcagctcataaccttggcattccttagttctctatttgaccaataaagcaataaaccacagtattaattccctttttctagattatctacagttcctgcattttcaaatctgttgaaatttttataaagaatgataaaaatttgcccatgtatagacctattcccactctcatctcagggccatgatttccttgtggcaccctctcgtacccaattctaacctgtcttggagggtcaatcacggtgtttgcttttatagaccaggaatggatgtgtaaaccacaataaattaatcagagtcttttgggatttgggaatttggagaagaacagaagctctggtaaaaacacaacttaattattttaactgctattaactaaacagatctttcaatctgaatttcccggagctagcctggttcctagcctctttcaaaccataatctccagatttcccatctgtgacctatttagtactctgcagtaatcagttgtgttacttttatctaaataaatcggatcaatactgagtctctctctttttccctgaaatgtctgtaagcacagctaggaagaagtttttacaccaccaccaagtgctactctacgtaagttccctcagtacatagagacatttatacaaattagatcctaagaacagacttcagggcctatggcttatcatgttgcaatgaattctaataacaacctccaataatgactgctacattttagaaaaagaactgcgtatcaaacaaatctatctgcagatcaacatataaactcagaacatatctgcatccatattcctttatgcattgagtcactcagtctggatacctgaggactttaagtacttaacaatggtgagaatgtgtttttccctcataagtaagtcacaataaaatgcgatttacttttaacataactagccagaaacttaactcttaaatggagaaatcatcatattggggttttggtggttttacctttgttctttctggggaaaattctaggctatgagttttttctgatatgtgaactgtggatggggtatacagtctggcagaaaaggtcaaatatgggtcttctcttggtattactggttattacccaatttttagggtctccttctcttgtacactgcaggaaaagaggaccacaggtatgtttttgttgttagcatcataaattcttaaatttggaaaggactacaaaagtcatgttattctataagtcaagccatattgcaatcttgagttttattcaaagtcaagttattttgttcttcatcgtacatcataagctatatttatgtctaaggtgaaaactgagccaattaatcaggtaatataggcctaaaacacaggtcaaggaaatactcaaaaagtaagagtgatgggagctttcaggaattatggagatgacttcaaatcttcattttacaaagcacatcagggatcacatgcagaacacagtaagtgaactggccatgtcctgtctgaagtaggacataaagaaagatgaacaaccaatgtcagtgggatgccatttgtgttgtcatttgtaacaattaaaacatcaagatttagctacagtttgtcacttaacttagcatggacccctgtgtcaccttttaaatatttaagcataaattttacaaaatataatggacaagcctatgagactgagtaaattatttttttcctctacatccaacagtttatggatttagtttagaaaaaactgaatagactgctgacaatactttatcactaaaacttgtaatatgttcatgcatttattagaagttaagatttatatcagattaacctttgtttgccttttagattgttttatctaacagggctttaaatttatgaattcacttgtatgttatattttataagtatattatttctatatcatattcttgcattttaaattgtctttgaactaatatttctactttaattttcttgcgaatatgatctaaagaaggcatttaaggaattgaagaaaatatgtcagaaagtgctaaccaaaccattaagaaaattttattagatcaacagtagagaccactgtaaaaactgacaatataaattggagttatcttgccataccctactaaattggagttaagaggccaggggagaaaaaaacattcggggcacaaagcacccgcccaaagactgtctctaaagccagctgccaaaatgacctgctataaccttaaaataagttttaccttgtagctgctaaaatgaactgccatgaatctaaggctagtttttttttttgttatttcattttgtttttaatttttactttttaatactgaatttttgtgggtacatatagtagcatatatgtttatggggtacatgagatgctctgataaaagcatgcaatgcataagagtcacatcatggagaatgaggcatccatcccctcaaacatttatcctttgtgttacaaatcagccaattatatatactcttttagtaatttttaagtgtacaattatgactaactgtagttaccctattgtgttaggaagaatgaataagatttaagactcgttttagccagtcaccatttacactctcactcaccagtttgccagctcccaaaaccttctctagtgccaattagttttctttcaaaacaatacacatttttttctaataaaacccccagtcttttccttgttcttcaaacacagagaacatcaccccagtctatatgtatgcctcaaattgcaattctgttttcccaaattaaatcttttgtttagagattcatctttatacttttatttgactctttcatacttgacgttagaagcagagtctgaagtagactcacctcagagagattagtaagccctggaactgggtcacatggtacccacactctggccccttccgcctccccactgcttcctcagggtacccctttccccccagtgagtctctcttgcatcaaactctcatttttctttcggttgagttcttcacggatttgtttaagagtctttcccccatcctatctatgaggccttctgcttatgagggattttctacctgctggacataaggcctcctgtttatgagggattttgtccatcctggttatgaggtcttctgtttaggagggattatattcccctcctgttaaagaaagcttgtctttcctgatgagtacaaactttatctttcagttcatttgcgcgctcggattttattttggctttgtgtagttggcattaaactgaatcacctaaatgagtttatttacagtttgggctctcaaggttgaaacgcatggcaagatagattccccgttctggaactccagctggtgacatgttatggggattattcaaacagtttgtttttcttagaaataaactaaaagaccattgctataaaatcatacagtccaaacagggcacatatctcattcggtatcttaaggctccaaaatgcattcaggactcaaagattaccttgctgcaaaatgctgtctcaaagctaagtgaggctctttcctccccaggccctttccctctccttctacacctcctcctctttctccttctctaagctaaactctctttttttctgaaactcctcagctattctggcatattgactaagttaagtctgttgaaaagtagtagataccaaaaaaaattattttgaccttcatgctgtttcttaaaagcaaaagatgaaattcccaagtaaagataccctctctatactagaaagaaaggtgacactcttatcttcaaaaacaaggaattgaaaccaagagaacactgtacagactttgtcagtaaaactcttatcttttaagtctcctcatgtaattcagtcacatttttacaattaactgttctttgtccaacccagctgtattagtctgttctcatgctgctaataaagacatatccaagactgggtagttataaaggaaagaggtttaattgactcacagttctacatagctgcggaggcctcaggaaacttacaatcctggtggaagggaaagcaaacacatccttcatgtggcagcagcaaggagaagtgcagagcaaaaagggaaaagccatcagatctcctgagaactcactatcatgagaacaggacggggagaaccaccccccatgaatcaattatctctacctggcccctgccacaacacatggggattatgggaactataattcaagatgagattagggtggacacagcaaaaccatatcactagccttcataggcttattaggacaaataaaaaatctgaaagtttagctttattcattttgtcagaactataatttggctccaactgtcttcatataagctaataaatttctaatactatattttactcattactaatttttttaatgaaaactgtcatttcttcacctgtatgtttttacaatttttaaattatatagaaagatagatgatagatagatagatagacagatagataatagatggatagacagagagatagatgacattttattaccaaattatttcaaagagctctattaaagggaaaaataagtccttaaatgaagtacattagaaatataaaaattaacccaaatgtcttttaggtcatatgatataagtaaatttttgataaacatgctgattttaaatatattgataaaattaaaatgaagatttctaagaattcttagtgtgtgtatacatatatatgtatatatacacactaactagtgtatatatacactaattgttagtgtgtgtttatgtatatagtgtgtgtatatatacactaattgttagtgtgtgtatgtatatagtgtgtgtgtatatatacactaattgttagtgtgtgtgtatgtatataatgtgtgtgtatatatgtatatatatacactaattgttaatgtgtgtgtatgtatatagtgtgtgtgtatatatagcctggatttgctggccagacagggttatgtttgtctctgctattttttttatcatactttaagttttagggtacatgtgcacaacgtgcaggtttgttacctatgtatacatgtgccatgttggtgtgctgcacccattaactcgtcatttaacattaggtatatctcctaatgctatctctcccacctcccccgaccccccagcaggccccggtgtgtgatgttccccttcctgtgtccttgtgttatcattgttcaattcccacctatgagtgagaacatgcagtgtttggttttttgtgctagatgttttaatatcataaaagtatgagtttgatctaagaacaaaggtacagatgaaagtgcaatgcagtgcccattgtttcctatatataaagcacaccaatttaaccttcagaaattttctcgacaggaaaattacttaaaataacaactagctctgtttaatatctcagttttcacaagtaatctaggtagaattgttagaaataaataaattagataaatgtaaatgagataaatgtttatagttttttatagtatgaaattttaaagttatgttgaatttaataatagatattcataaaatctgagtaatttctaaataaataaataagataatgaaacaattgcccaacatagattaaagtttatttagttttggctttttaaacctcataaaaagacaaatatttggatacattaacaaaatgtcctgttccacattaaaagttgttctataaaatctattaagatgatagattacgtattcatgagatgttaatatataacagttttaaattacttacttttcagttttttactaaaaattaagatttctaataattaaaagttctaattaatatgttattctatataaaaaacatacaaaaaataatttttatatgagaaagaaatttgtatagtctcaacgataaagagaaaaaaggtaaaattttgcccaaaggcaaaatgattggttattccggtataaaaaaacagaaagtatagaacaaagactgagagttcaagagaatgatggaaaatgtaagtcggtcatggagagtttcagaaggatgggtctcgtaaagggactttcttacatgatgagattggctgggttggaagggaattgttgataagtttctctaagaattgagcattggtgtcaggcgtgcactcatgtagggccgaagcctgatcctctctgtttgaaacagcaggatttcttggaatgtcaattttcccgtagtaaagaaaaattgcaagaggttttggttttaattttgaaatgtttatttacatttgaaaccattatctgaacaacaactttttctggttttatactttctacctgatttcaagttggaagtgctgtcttctttatttaaaattataatttcatgtctcaaggtagcgcttttctcttaaagcttttcagattcacatccccaggttcagcattttatggatctcactacaggtgatttgtagatcatgcactcttgccttctgctcgtcttccttctctctgaaaaggtgtatctttttgcttaacaaaagatatgactctctccctcaattatttttgtcagttcctatagctttttattgttgtcctgactctgctattatggtctcatcctgagaatcttcttaaaagcctagaagaacaatgcttcctatagtataacttgattgtatactcttggcttttcttaatgtgtgtaaattttttctgcataatcagtcaatttaacatgcttttactttttcctaaagttatgcattcccctgtttaggtactggttttcttgcttatattattcttccataatatgatatatactccataaccttggacacatattcttttcatgtctaactgaattcaaacaccttttcaggacgtttggctttcagattattcaaacaggctttccatgatgagaagcagtcatactgcaggattttttttttttttttactttttaaggaattagcctaagaaacagatattttgtattttaaggtagtatcttatgcttcgtgctgtctttattaggtttttggctacttgagaaaattaagtcatctctaacactggtttaagttttcttttctctctcaattatgccatttattgtttttgcttttgaagtcttttaattatcactcattaaataaaataactattatctctcaatgaaatttgcttatattttaattaaatgttttaagccttttaacgtctttgacaaactttcccaaaatgaaattctaatttgtctttttaatctaaaattgactttggaattcacagttggaccactggaaagattaaaaggatgtatctctcattaggcttattagatatggtggtttgtattaaaagcattatcaaataaaaaaagcaatactaaatattatttaaattatatttatatggctatgttattgatgtgaaagtactaaagattatataaaatttataaaggtctactggtcctgttttgatgtatcattcatgattctggttgttgtcttaaaattttgtatgcaatagaagctcctgaattttcctgtttattgcagaattctcattatattgtaactatggctttactaagaaaaatcatctatagtggtgattcatttctaaaggcaattgcaatcagattcataaaaaagtctctaacaagtactcataaatatgtttctaataactttaagaaaagtggactaaataaaaatttccaaaactaataaaaaaagatggattaataaaagaaatcaagatcaagcaaaacaaaaattacttacatgagaatatataactgataaaaaattatgaattgtgtgacttttgtttgaaacattgttgattctttacttaaatgttttgttttccagatttaagaaagctttcttgagctacctataatttacagtaatctggtatgcttttatgaacaaaagtgaaagcatttacttttgcttcctactgatccctccaaaatttgaaaactttttgtattttttaattttatgacaatatatttacataagttcaataaaaatacgttttttacaataggatgtaactagaatgttaattatattaccaaggcttaagatattatactttaaaatgttgatatatactacagataaaatctgaagcctgccttgatttggtttcccagcctcaacattttgttaaagagatccagtctgagcttcagtcattgttcttgctataattacataaatacttaggtcaaaccagacaaagctaaatctattttacaaacaaatttattttcctctaattatgttcagtaaaaattgaaatgtctataacaactctgttattgtactgtagccctgtacattgttttcaagtttttattatcaacctgtagactggactgaatcttaaattcttctatgttcctctaatccaattttctcctatgtgattactaagaacagaaactgctctttcttaaggccctataaactaaactcaatgacttaatacaaatttcaaggacaagcttcatgcttgatgcatgggccacacagtgagttcattaaactacccaatgccataaccagagacatttgacatttgaactgtaaaatttctaacttcacgatgtaaacaatttttcccgagaccatcagaacaagactccatattatgagactcttacccctcttaatgcctaccttttgcacttgacaggataatgctgtaattaaaatttcacaatcagtaactgctgtggttaagttgacagaacttgacatcagaaatcctttagtcctaacaaggtgaaaccccgtctctactaaaaaatacaaaaaattagccgggcgcggtggcgggcgcctgtagtcccagctactcgggaggctgaggcaggagaatggcgtgaacccgggaagcggagcttgcagtgagccgagattgcgccactgcagtccgcagtccggcctgggcgacagagcgagactccgtctcaaaaaaaaaaaaaaaaaaaaaagaaatcctttagtctacctggtaagtaactttggcaatatccctaacaccaatatttgtttcagttcactagtggtcccttttatagagtcggcacttttttctttaattcaacccagtcatgatatgctgtagcatatcatgaggacaacaggtttcacccagctccccaacggtcttttgatttgtttagttgattactcttaggtttgagcttttagtccaaaaccattgtacaaactgaatatatgtactatattgttgctgattattttttgtattatgatttttaagctctgttcttgttgcctatcaaatatttgtaaagccagttctcccaacagaataatgttagcccaatgctaatgttcatgggactaataagataggatttaactctaaatttcaagcaaatctgtcctaagaggttttttttaacctttctgatctctttgttgctcaaatgtggtctctgtccttgatattgattctcttagtttcccccaatacgggaccagagatcaccaaatccatcctgttaccaagagacaagtgagcctaacttcaggctagttgtccagtgatgctttcagagaaagatcttgatcaagagagagaaatgtgaaaattgactatataaattaagattatctttccataccctactcaattagagtcaagagtacagagggaaaaagcacttggggaccaaagcacctgcccaaggattatttcaaaaaccagctgctgaaatgaattgctacaacattaagaccagtttcacctagtagctgctgaaataaactaccatgactctaagactagtgtaacctaccaccatcactcacaaattacagcttgccagctccccaaaacttcactagtgccaatgagtgccactgagttttctttcaaaacaatatgtaacatttctttttctactaacattaaaactccccaaattctcattttaatttaggcatactgaagaccaccttgatctctgtaaatgccccaaattgcaattctgttttcctaagtaaatgttttgtttaaaaatttgtctctatatttttatttgattttgaaaccattaatattactgattaaagtcagatacttggcttcaagctcataagacatactttttttaggaatatatttgtatgcatttgattcataacatgtctatatattggaaagtacatatataacaatataagcataaatatacataaataaacaaatataatatacataaatagtatgtataatagtatataaaatgaaaaaatctttttcaaaatataaaatacataaaataggtatgtaaaatatataaatatataaaatgtatttttaaatttctgaagattaaattactacccccatataggtatggtataaaaattatttttgagacatatacagctctatctccattgagccatattattgtaaggtaatagagggaagatttaactcattttatttaaacatgctccaaagcaatttttatttccactataacaactgacagtgttgagtcaagtgagagctggggaagaaaacagcctaggatgagcatgccttcatgtcccagctactaaacagagttcaggcccagcagagcttcatttgtaaaaagttctgcctacagccaggacagacgcagtgagaggagtggtctccaactgatttctatatttagtatggtaggttaaataatggctccctcaaagatatccaaatcctaatctttggaatctgtaggcatgttactttacatggcaaaagattccttgcagatgtgactaaattaaggatattgagatggaaaattattgtaataacccaggttggcccaatgtaatcacaggggtccttataagagggaagcaggtggatcaaattcatcagtgggagatatgacaaggaaagcagaggtcagagtgggagagagatttgaagatgttacactgtgcatctcaaaaatggagaaaggtgccaaagccaagataatgcaggtgatctctaggagctaaaaacattaaagaaacaaattctctctacagtctccaaaacaaacaattcctctagctccttcactttagaactgtaaggctgactttttactcttgacctccaaaattatatgataacaaattcatgttgtttaaaccactaagtttgtactaatttgttacagcagcaattggaatataatacacttagattgtgatagaatattcttcataggtaagcactctcccatcccccacctccttatgcaagatgtactccctgccccttgacattggattttgtcacatgactttttgaccaaaaggatattactgaacgtagtagatgtaatgtgactatattaagctgttcttgcattgctatcaatagatatcagagactgggtaatttataaagaaaagaggtttaattggcttatggttctgcaggctttacaagaagtgcggtactggcatctgcttggcttctagggaggtctgaggtagcttacatcatggcagaaggcaaagggaatgcaggcacatcacatgataagagcatgagagtgagagagtgcattgtaggtgaggaggtaccacacgcttttaaacgaccagacctcatgagaatgcacatcatgaagacagcaccacgccatgagggatccacccccaagatccaaacacctcccaccaggccccaccttcagcactggggattacaattcaacatgaggttgtggggagtgtggcaaatgtccaaaccatatcattctgtcccagcccctcccaaatctcatgtctttctgacattgcaaaatataatcataccttcccaacacttccccacattttaaactcattccagcattaactcaaaagtccaaagtccaaagctgggtgctgtggctctcgtctataatcccagcactttgagaggccgaggtaagcagatcacctgaggtcaggagtttgagaccagcctggccaacatggggaaaccccatctctactaaagctacgaaaatcagccaggcgtgatggcatgtgcctgtaatcccagctccttgggaggctgatagaggagaatcgcttgaacctgggagatggaggttgcagtgagccaagaccacaccattgtgatgagagtgaaactccatatcaaaaaaaaaaaaaaaatccaaaacccaaagcatcatctgagacaaagcaagtccctttcacctatgagcccataataaccaaaacaaattagctacttccaagatacaatggggatgtaggcattgggtaaatgttctcattccaaaagggggaaatcagccaaaagaaagtggctgcaaaccccatgcaagtttgaaacccagcaggttactcattaaattttgaagctccaaaagaatctctttaggctccatgtcccacatccagggcacattggtgtaagggacgggctcccaaagccttaagcagttctgtccctgtggccttgcagggttagcccccaaggctgctctcataggctggagttgtgtgcctgtggcttttccaggtgcagggtgcaagctgctggtctatataacattctctggtctgcaagatcatggcccatttctcacagcttcactaggcagtgccctagtgggaactctgtgtggagcctccaactccatatgttctttccacactgccctggtagagggtctatgtgaggccttttcccctgcaatgggcttctgcctggatgccaggtttttctatatatcctctgaaatctaggtagaggccttcaagccttcttcatttttgtattctgtgcacctgcaggcttaacaccacattgaagcagcttatggcttgcattcacccaagtggccaacttgagctatacctgggcccctttgagccaaggctggagctggagcagcctggaggtgggggccagtgtcccaatactacacagggcagtgggaccctgggccaggcccagaaaaccattcttccctcctacatctcagggcctgtgatgggaggggctgccaaaaggtctccaaaatgccttcaaggccttttttcccgttgtctgtgatattaacatttggctccctcttaattatgcaaatatctccagtaagtagttgctccacagcttgcttgaattcctctcccaaaaaatctttttctttctctgcctcatggccagagtgcaaatgttcctaacttttatgttctgcttcccttttaaatttaggttccaacttgaaagtcatttctttgcttctgcaattgagcataggctgtttgaagcagccaggccacaacatcttgaacactttgctgcttaggatttttttttttttttttttttttgccagataccctgaatcatcactatgaagtttaaacttccacagatccctagtgcatgaacagaatgcagccaagctctttgctaaggcataacacacatgacctttgctccagtacccagtaagttcctcatttccatctcataccttgtcacctggacttcactgttcatatcactattagtatttttattatgaccatttaaccactttcttagaagttcccaactttctctcatcttcctgtcttcttctgagccctccaaactcttctaacctctgcctgttacccagttccaaagctgcttccatatctttatagcaatgccaactcctcagtactggtttttctgtattagaccattcttgcattgctataaaagaaatatctgagactgagaaatttatagagaaaagaggtttaactggcttatgattctgcaggctttaaaggaagcatggtgctggcatctcctcagcttctaagggaagtgtcaggaagcttacaatcacggcagaaggcaaagggggagcaggcacgtcatatggcaaaagtaggagtgagagagagaaagagattgggtgggggagaggtgccacatatttttaaatgaccagatctcatgaaaatttactatcacaaagacagcactaagccacgaggcatccaccccatgatctaaacacctcccaaccaggccacacctccagcactggggattacaattccacataagacttggtaaggaacaaatatccaaactatctcaatgagcaaagtttaatgagcgattaggcttgccccacccttgtcatcattgtgagaagagctgtccctggttagctgctgctccttcagccagccccagaagaaataggcacacaatagaaatgcccccacaaaaaactctcagtttacccaaatctgaagctgagctctctgccaagcccagccaaaaacagctaaccccagacaacccatacatctttaaaactgatgagttttgttttaaaccacagcattttggtagcactaatagttgaagggtgcacagatcatccttcaacataggaagtgatcagtgtaaagtctacattcttctcccctttctccaatcaactaagactgagcacaggactcccagatgtctaatggaaatactcttactgaatgcatagtcctaatggaagcaaaaataggcactgtgctccctgaagagggctgcaatctccacaggagcatggtcatgaagatgtaaaactcatctttcctcagactatggtcaccttatggctaggctacctgataaccttgtacccttattctcagccttttggaaaacaattttgtaaaaaaaataaataaataaggacatttctattcctgaagctgagttatcaaagaagcttaaagtagtaacttacatttaaatatagcattcttaactttctccagagttcttctcaatcacaataaagaaatgtatacatacataaggcataaaacatctacaaaatgttatttcaggatatctacttgcattacatttcacataggttatctcattttatcctcacccccatttgtctggtgttatcttcctaacatattatggatgaaaaaaggtagctttaggagtttgtgggcccttccattttcgcagtaaccgatgtgttttgctacctcagggtctccgtattgctttctactgtatggaaactgagacccagaggtttagagtcttcttatagtcacgcagttggtcggggtggtagagatgggtttcctaacacacaggctgcaattctttattctttggactaccttatttgtgcttaatccccacagtaaagagcaaaaggaaaatatcttgacaatcacagctgcctttggcatttgacagtaaatcacatttatcagctaccattattccagagtaatgagataaagtgtgacattctttttagataacacaaaaagttcttacatctaaattttttcaatctctgtcactgatttctcagaacactgtcaccctcttctgtggtcacataaaactcatttggaacacataatgtttctattgacttgccttttttttctattttcactgttcagggtaaaaataaagcttttgggggctcaaaaatgtttttcactgtttttatggcaatggtttttagagatagaaatgatagcagtttccatattcacattgcccaataaacgtgtcgtcaaacgttctcagagaactctcattaatcaaaattagttatttcttccatgcaaatgaggaggccttgaaatgatttaagctgtgcttgcagtgaatgcaatgtcaaagtgaaaatgctattacatgttttcagggaattgaagatatccctcaataatttctgggtatggataacactaggagatctctcttccctgaaaatggaagacaaagagaaggcatctcacgtttgaagcaaaaacagaaaaagaaggaaaaaaaagcaacatctttaaaacagacttcagaaaatacataaattagatttcacagtttatcttgtgcttatttgaatctggtagatattgtcttgaacattctattgaaatcaggagataataaacaatggagaaaatcaaaatgaaaggttaagtccttgcatgtgtatggatatgtgtccctgtgtgtgttttcttcaaatgggcaaaccagcttgtagtttctttcatctgaaacctgctttggcccaggctggcccttacagaactccggataaactacttaggtgggatttctggattggttgctggaaatgtgatctcagtctgcccctgatttcctgtgtaatcttgagaccttaatctctgcaccctgtttcctcatcagtaactctattcaaacgcatgtggttgggggaagggtcacaagaaggccaagaggccaaagagggaaatacagggataatttcttttaagcatcgtaatgtagatagcctgaatatctcatcaagtctgaatgggccacacagttctgccaggagaattcattcttaaaagcaagaaagagaaaatattttgtaggtacatctatctgtatatccaaaatcatttgtagttctctaaagttaggctctgagtaagaaatagaactcagagtgaatagtatatgtttctacatatctgtgatcctctcatcaattaagaccacaaaacaatcagcttgtaagcagagaaacaagagtgagaatattatttaaattgtgttagctttcttaatgttactatgatacagtggttttctaccctgactgtgcattagaatcttatctatatcttttaaaaaacataaatatgtaagctccacacctgaacaactgaatcagaatttctgggcgtactattaaatctctacaggtaattctgataagcagccaaagttggaaaatatttaggcctgagtgatttctgtttgtttcagaatgtaaaacaaacaaacaaacaatctaatcactgactactgtttttcttgttcacttttaaaacattaagtagacatagtctgaattgaccacttgagtttctgccaaatttcacagcagacatattcttgcctgacatggtcaaaaaagttattttatgattcaaatcccttccaccccatcagacggatagtagaacgaacattaaccctgaaaacatcttcctctgagtcaaggtttctcgccattggcagtattgacattttgggttggataattctttactgtagggtctgtcctgtgcataataggataggtagaatccctgccctctacccacacaatgtgagtagcatacctcctatccccagttgtgacgactaaaaatgtctcccatcgtggctgactgccccatggagggcaaaatcaagggcaaaatgagctcccattgagaaccattactctgcctgaaaagaagaatcatacagcaattgaattacatgaaatatttttcacgtgtcaagctttccttgatttgggtcgcccaggtcactgaggggaccattctaatgaactagcgtagcataaatggaagggagctctccctgtggccatcttgttgtaccctccagttggccatccccacttttactgtctctaccaccatattacaactccattccatcatctctagggcaatgacagagctgctgaaatggccctgcttcccccagatcaggttcatctcagggaattaacaggtggaggctctcagcctccagcatcattaacctgatcttgactcagaggttaagtggacctggaaagaaagtaaattgtctttcctctaaggaaatttatgtttaattgttcatcattgtgttttgtcatttaccatattcttcccccaaacattcagtaacagcaagagatttcttttttgaaatccaagacagatagaggctgaaacaatgaagctactgaaagtgcagtataccttttacaaatctataacacagtcaaatatcttgaaagccaggatgacacataaacccctcctgggacccaaatcactgccaagagatagaagacaaatggaaaagagataatttgaacaataatatttaaacacaaaattgataaatgtaaatgcagagtgattatgttaactttaattggaaaatcaaatttttcttagcagaaaggaggctggaatacttaaactgggatatagagaagttatatttaaaattatgcttgcaggtgtagctgctgtaaatgtttaatgacaaccccctacaccatttttaccatggacagaggactctgagctccccaaatgagccaaccacattttcgtttcccttcactggataagcaaactggattctgtgacaattttttcctttttttttagttttgtcctcacgatcagtaataccatgaaaacatttaagttcacaaagtgatttcttatacattatcttaatgattatctccattttacaaaaaagaatcaaaggtgaaataatttggtcaaagttaataaatgacagtcctcatactaacatgcagatttgttgattccagaatataatgggtaccttacattgcagcctggtagcttagtagttcaaattgccttttggttgacaagaattagttttatgaatgtcttattttatataataattgaagtggaagaccacatctcaatgtttgtttattgctctgtttggtatataatagagcaatattgcaagaggcacaaatggaagttagatacttaggatgtcattttcctttgtgtagacaccagtttctcttgtcatattcctggtatgacctcctttgcattttgtgtatttttaatactgtgaaatgctctctgaaataagcctcatcttgtacagaaagtctgtatgttggaatgggaaattgtttgccttagaatccaagtactgactgggcagcttcctttatctcttcctctaaaagtcaatgtataatggaatcattaccactcatgcttagatgtgaacagcgtgttcaatttaatattccattctagtaaatacagtgaatacctgttattcctcttcctgtccacacccttcccaaggacccataaaaacgggaggggacaggtggggttttcccttttcataaatcaagtttcctggagttttctattgtttcaactgggattggtctattaataagcaattaatatcctgaaactatcatccctttatggaaatttccatattctttctgataaatagaaatagttttccaaatgtattaaagggaagcaggaacatccctacccacttgtccttgtacaggaacatctaggtcataatctcttttaattctgattttttaaaaaatccattcaatataaatagcaactgcttcatattggctaagactaggaaatttctcagacaaaatactattaattttgcatcttattaactggatattattctcatgctttaactgctgcctgtttgtggaaacttaagtatatgttaattatgctaaatataataattagaaaaatgaactagctaaataaaattctcagtaagctggctagaaggaatagagaaaaagaggagcagccaggaatgtggaaggtagacagtattctgtaaacatctgtctcagtacagaagcgaaatcattatagctatagctctggcttcccttaagctccagaagcttggcaaaaaaaaaaaaaaaaaaaaaatcctaaatatacagtttttctcctatgaacatatttttaaggtacaaattttcatttctgtaaaagccctttgagattttataaaactgtatcttttgctatttaggtgatctcatcttgttccatgactacctcagactggacttctccctttgctcccccaaagtcaactggacacctttgctcaggtgtttctgaagtaacagaacctcatctgtctaaattgaagaaattcgtccgtaaattgagcaaaatggaacaggcatctgaaatttctaaatatgcaatattttatgcctgttcaataaatatgtttaacaagtgaatgcaaaaacaggatatgctacttaaaaatctaaatgggcctagggaaattcacaccttaattaattttattcaaatgattgcttgcttctttgtttttcctaaagtcatgagtagttattaggctgaaaaaattaatattaaatacctttattacaatcagaatgtgttcctattgcatcattttctcctaaaactttaatgtgtcttcttgtctccttcttcccatccttatttgccttttatttttattttttattttctttcttatccaggaattttaaggatcaattaattgaaaagatatgactagctatctaaatagattttttattatcaaaaacaaatatgaacttttagtcatttaaaaatcaaaataatatatcagaaaataggcatttttgcaagtgggctttttttgccaccaggtttatggttttactgcttccaacctaccagtttatagagataatattcacttaaagcaatttcataatactgtcaatggtttgcattttttacactctacctaaccataacagtatctgtataacattgtagtttagcattgttactggttaaattccaagctaagaacttgattagaataagacacctctgatccttgaatcaacccttttcatacagtctatttttagaacaagttatgtagtgtgtggtgtgtccaatagggtgaacgtgatgaaatgtataaaaccttacaagtaagaatgaagcccattagtcaaattgtgcttttaatctgtaaaggcattacatcataagtcatttagaggaaagggtagagtttcctcttgaattcattacagcatgaaaagtaacatttagaaggtagagtttacaaaatgaaattgtacctctcaggtagaagcaattttcccatgagaaagtacaccttctacttaaaaagagaccaactgtattatttctctattccatcatgtataagtgactggaaacttctgagctcactagtaaactttctagaactctcaatgcaaagaaaatgaggcagtgcaaatcagggctctataaaaatacagcaaagagaggccatttcatttgaggaaatgttatatgtagatatttttaacttgagtctagaaaattttctagaagtataaatatgtagcttaaatatgtttcttaaagatcactggataactaaaactgatggcttgcctcacatccttgttttaagattcacctgcttaatacccaggaactcctgaaatttaaatacttgattaaacattaagacacctgaaaattaaaagtttaatgtaatcatctgacctcaaattatgccaaaaataaaactgctccttttctaaaatgattaataaaaaagatggcaatgaaaaattgtaacacaaaaagcagatgggtatcgattcacttctcttccaaacaaagtctttgcaactcagctttctcattgtaaatgtagagttttacaaatccttacctacttttcaaatttaactggaaaataaattgaaatgatgtatgtgaaagtattaaaactatgagccatatcagtgcaatatgatgaagagttgaggtaatttgaaaatatttagcctggagaaaagaagactcacatgaaataggatagatgtcttaagatacttcaaaggctgaaccatggaagggattagaactattcaaaatgacctgcaaaacacacatacacacacgcacacacacacacgcacacaccaatagatagaagtaacagaaaaatagatttgggctcaataaaagaaaatacgtttctaatagagtttttagaagctatgagctttgccacactagaaatgctccaacggaagtagaagacattattatactaatgctgaggggatagttcatatctcaaactggcaactgagctatatgatctgtaaaatcccttccagagtcaagaatctagtatttgaaacatatagagtataattgttattgtttttattgtattgttattttcaatattctcttcataagtgtctaatgtaccttaagcatcggcttcataaagctataagatcctctcacagaggcaagattcttatacctttgtcatctctacaatttggagaaagtaaaaggcagaagtgtcaggagtgagcataccaggaaatacatccaaccaagcaaatatgcaacaggctggaagagagacaggtaggagaggcacaaagacaaggttaaggagttatctaatggcattactttccctgggactagttctgtgtctgcacacaatggagaaatagatgttttgtataatttcagtttagccaaactgataggatccatgatgctaagatctttatatacagctatgagtaaataaaatgtgcataaagaattgattatcaaagtaatttattataattattaagaatagaaacatgtatcacttaattaattagattacatatagtctagttaactcagaccttatccttttcttttcttcaatatcaatgttcttgttgttgttttgccatgattacccagataatttcctcaaagctctgtatctttgcctttctggaaacacgctgggcatgctctgaacacaatgctaagtctcagaaaatgttctaaaaactttgccagcccatttgcctaggaagtctggaactgcctgttaggccaaatccttcagtatcaaatttaaagcatccccaatattaaatcaaagggacatcaaattttatttaataaatatgataaggtgttttgtcgctcagagttggaactataaagataaacatcatcaatgagatactgtggtccaacagacctattttcaatctctctgactcccattccaaaatatgtaagtacacttatctacttgcctcagatgaatccagatgaatccaagtaattcatccaagatgaatccaagtaattcatccaagatgaatctttttaaagaaatttcacaaataaggtaaatattagttctaaaaccccattaaatagaatattaaattgactgatacatttgagtgtggagcaaatgacaattttaaaaagttgattaaatgtaaaggaatacatacaatcaaataaagaaattaatttcaagtatcatttcttaaattagcatataattatacatagctgaaaagtccatttaaaataaatatggcaacatagttaagttgtggcttgcctaaagctgagaatcattagtgttcagacatctgacaagaaatggaaactctggtgaaatccaaagttcttgaagtattcaaaaaaaagtcactctgttataaaaacagcactgtttcattcctcaacctctttttttttctttttagccactagaacccactaaaataattgttaaggttataaatcatttcaacagaaagcaaaagctcagaaaaatcaaacatttagctggctggaaatcacacactaaacgagaagttaaaactaaacttttgaatttataagatgataacagttatttgtgttttattcaagtctgaaaatatttaatttgttgcaactaaatagagttcagatgaagacagataagtaaaaattcgcttctttcctggtagtgcaaaatgataatgaaaacacaaaatgtttgaaatcagctgaaacataacaccaggaaagaacacgcgtacacaattctttacttgccttgtttcatcttctctctctctccttcatgaatctccatccttttaagatggagaagacaagaaagagtgagttggaggggagggtaagaggaggtagtcagaactgctactaaagaaaagcttgggcaggagagaaaacattgaagcaagattcttcaatctcagcctgctcctttatgaaacatatatatatatatatatataatctgagtcaataatggtatgtatccaatttggaagcataatttctattatgcctaagagcatggccaatttcctgggtgttacacttgggtagttgcacagggcaactacagaaagggccaggctcttggtctaatgctttgctgtagtcatcttgacattttaagaatctcacctttgagcctgtgtttcatacatttagtccacagggacaatgaaacatgtacgtgagcaggggacataccctggaaagcagccagggcacgcagggactcaggccctgttactgctagcagtcagcagcagggagcatttggcctggtcaaccactgcacacacctggggcagtcttgggcaccttgcagcctcaagggggcagcctagctaagactctggcccagattgtcactgacaatggcggcagtatcaaaagcagtagtagtgagagtaacagctgcagccctacaggaaaagagaatctcccaaggggaaaggaccctcagaatgagagaccagctggcctggctatcctgcaaccaatttctgcagtatctgtgcaaatacccactccctggcctacgagcagggacaggaacttccagtgctcaggcagtatattttatcagtaagcgattacactttaaaagcaggcacatggacactgcaataaaataaattagggagctattaggatttttcagagtttcggatctctggtttaaaatctgctagaatattgcaaagtaaatatccataggcttagaagaagaaactaaaaattgttgcaattgatggaaaagagcattcttttcatgtgatacttcagataaattattagtgagaatgaaaattttaaatctaatttaacttgtaactgaagataaagtgatagaatgtataaacaaatatatccaattctaaacaaatcatgaaccactttcagtttcttgtatgacctccctaaaatacagaaatgtcagaggaaacattaaatgccactatataaatgtgcatttaattcatatttctacaaaactgatttgtatgaaaagttaaatctttttgaaaaaaccgttccccgagattctttagctctagatgtactaaaatttatattttgaaataatttatcagaaaataaattcattaaaagtataaattgtgttgtaccaataaataaattcccagataagcaagccagaaaaattatgcaatgaatcattatatcccaccaataaagttttataacatattctgttgtcaccaaaaatattactgtttgcatttataagtttatgtttactcatttattactattgcccttattgcatgttataaataaaatatttttacatgaaaaggctttatattaaggttttggtccagttttgctaaaatataaattccaaaaccctatgctgaattaagtgtgaatccactgttatgccaaccattcgaatcagaatcacctggaattcttattaaatatacaaatcccttggcctcaccccaaacctattctgtcaaacccccttgggaaggcagggctgcagggaaacatgagcatttgcctttataatgagctcccaaagttcctttaaccacacttcctttatttgctttttgaagaaagggcactgcgtgttaattttgcattttcccccacaaattatgtagcaggctccacctgagaggaagtaaactttgagatcattttatgactgagaagactgaaatccatgagggttgaatggctcagccgtgatttcaaagctagctatggagaacaaatttctagactttgaatttgagaggatagagcctggagctgatcaagaacccacttagaaacctccaaattattagaagatatggatctgctccttagagctaactttcctgggtaatcaagaccacagggaaacagagacgcagctgagggtgcacagtaagcagccagagcatagaaaacaaagaaggggatgctctgccagcctgccatccaatagggaaatgagtcattggacttagccagatctactgatccttttcttttcagtgaacacttgcaaaaacaaatctcaagcaagaatggatcaaataaacgttttctttaaacactttcatggtaagggtgtggtgaaattgtaatccttgtggatcgttggtgagaatgtaacatgctgcagccaccatagaaaacagttcagagtctccacatagaattaccacatgatccagcaattccatgactagacatagaccccaaagaattaaaacagaggctcaaacagaccaatgtttgtagcagtattattcacaatagccagttagaaacccaagtatctatcaacagacgaatgaataaacaacacgcggtatacacataaaatgaagtattatctagccacgtacaagaatgaaatcctgatgcatgttacaatatagataactttgaaagcattatgctaaatgagatggcagacacaatattgtataacttcattcatatgaggtacctagaatggtgaaattcacaaagacagaaagtagaatggaggttaccacaggctgaagtggggggaatggggatttattgtttaatgcgtacagaatttcagttgtgatcatgaaaaagctccggaaatagagaccagtgattatcacacaccatggtaaatgtacatattgtcactgaattatacatttaaacatggttaaaatggtaagttttatgttatatgcatttcactacagtaaaaaataaactatgataagatataaataatttttttaaaaaactctaggcccctacaaaacatattgtctgggttccagattattttcatttccttatcaatttaatatctcagaaattaaaatcaaagttctaaaaatatccccaatctttattgacatttgagtgcccaaaggcaatggtaaatccaatttatagtagaactgatttgaagaatattatgaacaaatgagaaatgtgagaacatttaactgtctcagaatcattgaattttagagttagagagaacttcagatatcttgttcaatgttttccaaaatgtatttcactgaccactcatcccacaatatattccatcataaaagggttctatgccaagtcatcataaagagactacactttatttttttattatttatttatttttttgaaacagggtcttactctgttgcccaggctggagtgcagtggccccatcatggctcactgcagccttgacctccctgggctcaggtgattctcctgcctcagcctcccaagtagctgggaccacaggcatgcgccaccatacccagctaatttctgggcctgggttggcttctctctagctatttgactttaggtgaatcaccccaaccttctgatttccagttttctcattagcaaaatgaatgggttgaattagatcaatgtttcctccaaaaggacctgtgattaaatgagtttggggggaaaggaggtaaaaataagcagtggtctatactgcgttgattctgaaaccatttccacagagtcatccaccacagatttacccagtatatttggagagaggggggtttgtcacgttgcccagactggtctcaaactcctgggctcaagctatttgccctcctgtagacatcagcaaatcagccctgtgcattttaaataaaccagacctgttttgcatgccagtgattctcaaattgtaaagaacacagtaatcacctgggggtcttgcagaagtgcagattctgattaagaaggtctgggtggaatccaggaattagcatttttaacaagctctcagggctgctgccgctgttggtcctggatcatatattctgagacaaggctagagaaggcactgcaacctcggacagcacaggggtgagagtgtgcaggtaggtagggccataccagttgtgaaaatattgacatacttccatgctgactgataagtaaccactgaaggagcatccagactccccaggatccagaaacaaataccagattccacttgggggtgatatggtttggctgtgtccccacccaaatctcaccttgaactgtaataatccccatgtgtgaagggtggggccaggtggagataattgaatcatgggggtggtttcccccatactcttctcgtggtagtgaataagtctcatgagatctgatgattttataagtgggagttccactacacaagcccttcttcttgctaccatgtaagacatgactttcctcctccttcacttctgccatgattgtgaggccttcccggtcatgtagaactgtgagaattaaacctctttcctttataaattacccagtcttgggtgtgtctttatcagcagcatgagaacagactagtagagggggtctcagagccacttcagagttgcagccagcattcattctgattggtcaatgacaggctgaacagttgtttactgtttaaagtaggttaccctggaaaaggtcttaccagacaggcagctcccagtaaatctgtggtggatgactctgtggaaatggtttcagaatcaatgcagtatagacccctgcttatctttacctccttttcccccagactcatttaatcacaggtccttttggaggaaacattgatctaattcaacccattcattttgctaatgagaaaactggaaatcagaaggttggggtgattcacctaaagtcatatagctagagagaagccaacacaggcccagaaatctgttcttctcactctcacagtcatgcccaattgagttttcctaatatataagatggtttagttcagcaattgtagaagagggataacctataaagcttatattgcaaaccaggtaaactatctgaattagcattactttaaagaagaatctctatttctttaactccaaaccctcagctacgaaatatatttttatcagggttatagaggtattatgtgaaaattctactgtatctaaaatcttcaggtcatgctgtccaaaacccctcaccagagatgcagaattgagctaaagtgacttgcttaatgtcaccagcacaatggctatttagtgacaaatccaagaccagtacccagatctctttactctcattgtggagcttgtttctgcaaaccgcaactggattcactttagttttctaaaggaagtatctgaatgaatgactgtttagcacagcccaagctgctgtgtaactaggtcactgaatacaagtttacttttcttaagaacaaggtgtgaacaaccaccatctgagcatgaatgagacctgcaatggtgtactataggcttgaggaaactgccctctgctgggatgcagtgatgctgcctttcaccatacctttaaaagaaggactgaactattaaatattccccgaggttcaatgaggaataaaggaggcacgcagagatattggtacacggaagcaaaacgttttgccatatgccttcttagaaaattattttccagctgcagtcaaattccctttaacaactgcatctgcatttgtaacccctacgcagcatcccggctgctccacgatggccttgggggatatctgttacagggctggatgccctcttatgagaaatctgggagttgtatgccctgattctcacccacctcaaaccaagaggacacagtggttaccgttgtgtgttaccagataaggttacagaagggatcagagaggtgtctgtgattcagttcaaggccaaggtaattgctacaacttcagcactgaagcgttttacaaaggaaatagcaccatcaggttgcaacactggttttcctgttcaatcttaaaaaggaactgccctcaataaatcatcttcctaatggaaatgacagaattattctcccaggaggacaatacaaaccacacatccctcttaataggaaggaaacacagagccacagctgcctgggaggatccaaggcttccaagggatttgtttcccctttgtccctctgaggtcactttttacaaattttctaagtcattgtttacatgtaaacatagacccccatctcctcaaatatgttgtctgtttcatttttttctaaaaactatgtctatggttaatgtaagggaaaaaaatcatcatatatctaaagcaaaaagtaaagttgtaaatcagagtaaggtatgtttttgttaataatgccaataaaattaaatgcaaaaaaacagagtggtagcttttggagaagactgtgtgattatctctccttctgcgtttgtcttatttttaaatattgtatatttttataattggattataaaattcttgttatttaaaatcatttattcgatcatgtataatctaccacaagggtttgatgcataccaatatcactagcaacttttaaaagtggagcagaaatatatagatcatataatgggattttaaaaccagaactaataattcactttcacgttctctatcaattgcattacgtttattaagaattagtaataaactttgcatatggcatttggcaaagaaacttcaattcatttctttaaaaatgaatttgttagaactccaggtttcttttccaatcaaaactttaggaaatgccactcccaaaccaactgaacagccaggcttttggtttctgagaaattcttgcccaggtcaccagagaatgaaaggtcaactttgaggaagtttctggaacaaggaagaatatcagtgaaattggctggaattttttgagcggtgaaaaaaaaaatcccttgactattaagtaagctatatgtgagtaaggtcaccgttttatcaaattcatcctgggcatttggtcagatcctttgaaactttttcccatggttaacattctattttgttgcatttttggcatgatgactaagagatttggggcactggcccaaaaatcataatttttttttgttgttgttgttataacaaattaataaattagaggaaataggtgttctttttttttttttggaaattcacaatgaatagcctactttggggagaaaaacatcacaatttgttacatgttctttttgcattcttaatttttattttttctgccatgataaatcttatggagctcttaaacagaagcgttttccaaatacggttcttaagaccctacagttttctcccgcttccatctaaagatctgcatgaagccaaagtttctttatatgtttcatccaaaataacatgttgtaatagactgaatgcagaagcagataaaagaaattgtcttctattaagccagacataaaagattttcaaaaatgtgaaacaatgacgttttctcactttccttgtttcaaaaaatagttacttttcacagaaatatgtcatttatggaaataaatttagtatttttcattaattgcttttgtccattactattatttgtaatgtattagtaaatacatattttttattttctcaatattaatttcaaatacagtaaatagcaacagaaagaaccaaccgaaatagaaactctttgggatcctcaaatttctaacaatgtaagaaggtcctaagatcaaaaagtatgagaatttctaagatagagaagccccttcctttttaagtttcatgtacacgtttctggcgggaatagagcctgtactatatctctgcacaactctcagagatacttctttgaacctttgagattttaaatagactattagggttgaccaccctgctctcaaacaatgtgtaagggtatttacaatctgtaaccctgctataagtcataaataaaatggagctagtgaagagaactttttatctggggtaatcaataggtgctgaatttaagaagacagcagcattgtcctcaggcataaaaggcaaataaaaacaaacgcacacatcccatcatgcaggagtttaaacaccacgtataagtatatttccatatcttaattgatgaatttatgatctattctgtacagatattctgatttatactaaatataagccagtttagcccccccgaagcagctcaatacatgcctaattttgtatcacacgctgtagaaccaaactccttctttctattaaactactactacaggcttcatttatgttgttatccttgcctaaaaaaatgccccctattctttcctttactttcaaagctcaagctaagttgtaccttcctctaccaagatttccttgataaaattcaatgaaataaactgtttgcaaacatggccctaattctctacatctccctgtatccataccctttccaggtggctttaaaatttctctcatcgaaaagtagagtctgttttcctattctttgaaacttagcctaccttgtgattcactttgtccagtaaaatgtaatgcaagtaacagcatactagttttaagcaaagacctctctctcttgctcctttgtcttcctcacaagaacgagatcacaagagcagttggaagatgacagaccacatggagcagagccttatcatccaggttgaggccattctagaacagcaaactccagctggcctaccatttgactgaagatgtgtgaatcagccaaaccaagagcatatatttctggcctaggtgaaaataaccaactagccaaactataaacttgtgagaaataataaataatttttgttttaaaccactaagtttttgaatggtttgctatgcagcattattttagcaatagataactgatttgctaatcctctaatttccccagagaatgaaccatatatctgcaatgagtcctagacatttttccttcattatatactgtcttaggctgtgaattggtgtttctgaactacttgagagactatagtacaccttagctttcctgtttttggctcaatagatatctaattggtacatggagcaattgggaaacttaaatttctagacatagaaggattcttcaaaattactaatttcttacctgacatacattttcccctgaaattacaattttaaggaaatttgtcttttaaggaacgaatttatctttcttttgcttatttttcctccaagactcaatctccatgagttccaagactcaatgagtatgcagaatttataaccacacaactacagcttgatctgccagaagaaaacattttcaatttaatcgctttctcatttctatcactgaaattctagagctctgtaatctactgtctccatcatttttgttattaatattattttggaaactgttcaaaaagaaagcgagtcactttgcctgaaaggcaattggctcctgctccagggtggcctcaagatgctacctctcaagaacactctgttcattccctgaaaacttgtgccatgagcagccaatgacaaagatgcaaagcttgtcctccagaacctcacatttctttttctgtctgcctttacgcctttctggtcacttatctccccaacatcctaaaaaattcaatgccttaagcctttttctgaataacagaagtcccacaatgtgaaaactattctcccttcaaaatgctccatgaccgaaaggtgatttgccttcttccctgagtccttaccaaagtcatgatccttaccaaagtgtcatttatctcacctcggtgtctggtagaagaattttattagaattattcatgtgaataagtggtagcttaataaactaactagaacaatcatttgcataaagaggatgattgttaataaaattatagcagtggtaataaactatttgtggaaggatctgctacctgttcaccaaatatcattgtctactcttcttcctgggcacattatttctcacccagggttactcagaaattgcacgttgaagaatttccatttaccaggtttcctgaattactgcatgaggagggactgcttttctaacctgttaactgttacgtgaacaacagagaaactttagttttgtttaaattataaaaatattggggtttatggaagctagagttaccctgaataattcactatactttattcataatgtgatttatccttttaaagaaactttttattcatttattcacaagcaaatttcaccaaaatttttctataaaaggccagctagtaaatattttagatattgtaagtcatatagtctccgttgtcaccactccactctgtcattgtaatatgaagcaagccatagatgacacataaaacaatggtcatggctatgtttcaataaaactttatttaccaaaagaagagggaggtaggctggatttggcccataggtatattttgctaactcctttgatagatgataggtaagtaaaactagaaccatacctttatgatattggctggggtcactcccacaactgcattcaacagagtatttgatggtgtctgaaattttaagatagtttcattcttacatctggtgctttatccactgtaactgaaacatctgggggctctctgagctcaaacttcttcacatggtgctggatcccaagagtcaaccatgggagctgccaacctgaaaaccttaaaatatgtagaaaatttaagtagggcaacacctgtttggccccagtgaagaatgtattggaatggaagctgagagtttatgctgtatctcatccaatgaagaaggacctgaggtcacctgcaagaagggtaaaaacataaagtcccacatggcacaaaagacttccccagacactatgctcagagacttgaccaaactttagcttgacttcctcctgtcatgggtggaagccatgtccctaacagtgaccccagccttgtaccgaatcttcacccaagaacgtacagcacttccaaatcataaaaaatacattgtttcaacccatcttgccaaaccattcgcagtaattctccacctacccctttctgtagtttttccacttccacatggctccctagtccatttttccttttttatttccccgtaagtccttttttgtgtcctatctgttctccccttaaaaacctcagttatctttgtcttagttggagttgagctcaggggctcagtctatactggagactctttacttactgcagtaagtctaattaaatagtcttgccacctttaacaagagcccagcactgtttttctctaacaagtgtagacagaaataattagaagaaactggagaagggctccattattttcaacaaatacatcagccatactttatttcccctcctgtaagggaggtatctgaaagtagaataatgtttagatttggtaattgtattagttacctattgctacataaaagaaatcccaaaacttagtggcttaaaatagcaatgacttttttaacgattctatagattggctgggctcatctacatgatttgttttctcttcctgatattcgctacatgatattgactcctaaagctgcattcaacaggatgcttgatcagggctgagctactaagatggatttatcttcatatctagtgactcattcggtgtggctaaaagatctgcgagtcaatggaactcaagcttctttacatggtgctgggtcccaagagttcaacaatggaagcttcaagggttcttaaaatctacctctggaatcacatgtttttactttctgtatattctactagtcaaatgaagacacagggtcagcccagattcagcaggaagggaagtagactcttcctcttgagaatgaagtggcatagagctgcagacatgggaagaattggcagccatgtttgcagatcctactacaacagttcacatcctgttcacaagtgttattgaatggtcataggagaattctacattcaaattgaacaggaaaaatggattgaacctaagttgggagtttgtggggagtctccaacagggaacagcaaagagcaagactgctgggggcaaacttgaaatagttcacgtgcaagaacataggatgggtataagatgagtaatgaagtctgtgaggtgaaggaagagctgatagacttatatatttatcccatttgatgagataaaccatctcttaagtgcagaaatatttgatgatggtttcctttcctcatcctctttaattatgtcactggatgctgctcttaatacaaggaactgtgagtttctagtagaatcattttgtcttgcaagcttctgcttgaaaaaaaaattaagaagataaatttcagcaccttcctttcaaataagcaactgcacaaactgtaataaccgttacagatggttgttttaccttcagcatctgcatttcaaaaccatgaggaaaataaaattataacttctagcaatttttgataggaaattcagtattttatagaagcaaatcaattgaccaaatcaattgactacattttatacacatcatgcaaggtcaatgtagtaagcaaggtttacacatctcaatgcaatatgcatatggaataacatataatggaagaaaagtatacaagatcagcatgagagccttaacaggctcaaggcagtctggatctctcaaaccttctaaggctgagagactcagcagtgaaaaggtaaatataagagggttactttccaacacaaaactaaaagacatcctttattttccccctttatttaaagtgagagtgtattgtgaaagggaaatagactggaggaagaaagaataagtgcacaggaattcccaaggaaaaccactgggaaatttttgaccggtacactgaaaagtctattgctgaatttcacatccttctctttccctcccaactccagaactctcctcactacacaagtagtggacccttcctaatgtcataaggctgcactaggtttttctcaactcgaaacagagagattgaaaaattgacagaatagggataatgaaagagagacgtataatagatagataaaaataattacttttatgttgtctagtttggtcttctttgctaaggagattttttaaaaatagactttattttttgacataagtttaacgttcacagaaaagttgggaagaaagtatggagttcccgtataccctctgccccacgtgcacagcctcccccactgtcagcattccacaccagagtggtccacttgtcacatcatcatcaccacactccatagtttacattagggctcagtcttattataaattctacggagtttcgcaaatgtataacaagatgtatccaccattatagtagcatatagaacagtttcaatgcccctaaaaatcctgcgttccacttattcatccctccctctcctataacccctggaaaatactgatttttaaaaaaattttgtgggtacataggtgtatatatttatgggagacatgagatgttttgatacagacatgcaatgtgaaataagcacatcatggagaatggggtatccatgccctcaatcatttatcctttgagttatagataatccaattacactctttattttaaaatatacagttattattgactatagtcaccctgttgtgctaccaaacagtaggtctgattcattcattccgactactttttgtacccattaaccatcctgaccacccctcactcaccctgccattatccttccttttccaaaatgtcatatagttggaatcatacagtatgtaacattttcatatagatttctttcatttaataatatgcacttaaattgtctccatttcttttcatggtttgttagctcatttctgtttaacactgaataatattccattgtggatataccacagtttgtttattcattctcctactgaaggacatctcggttgcattcaagttttagcaattatgaataaagttgctataaccatctatgtgcagatttttgtgtagaataagatttttacatatttgagtaagtaccagggagtgattgctggattttaagattatgttaagttttataagaaactgttaagctgttttccaaatggcaataccttttcacatcccacaagcaataaatgagggttcctgttgttcctcaacctcaccagcattttgtattatcagtgttttggattttagccattagggatgtctcttttttttaatttacgattctctaatgacaaatgatgttgacccattttttttctttttttttgagacacagtcttgctctgtctcccaggctggaatgcagtggcacgatctcagctcactgcaacctccgcctcccgggttcaagtgattctcctgcctcaacctccatttttttcattatttgccatctatatatcttctttgatggagcatctgtacaagatttttgctcatttttaattggttgtgggttatttttttcctattgttgagtttgttctttgtatattttggataatactcctttatcagccatgtcttttgcaaatatttctatctgtggcttgcctcttcattctcttgacattgtctttcacacagaagaaaattttgattttaataagctccagccaatcagttattttgttcatggatcttgtctttgctgtgtatctaaaaagtcatcaccacacccaaggtcatttggatattctcttatattatcttcctggacttttatagttttttgttttacatttaggtctgtcactcattttttgttaagtttcataaacagtgcagggtctgtgcctagattcctctttttgcatgtagatgtccagctgttccagcaccatttgctgaaaagactattttggtttcattgattccctttgttcctttgtcgaagaccagttggctatatttatgtaggtctgtttctaggctctctattccattctattaatctatttgtctattcttttgctaatatcacactgtttttattactgtagctttatagtaagttttgaagttaggtagtgtcagtcttctgactttattcttctctttcaatattgtgtttgccattctgggtcttttgcctctctatatatactttagaataattttgtcaatatctaaaaagtaacttgctgaggttttcagtggcactgcattgaatctatagatcaagttgggaagaacttacatcttgaaaatattgagtattcctatccacaaacatgggctatctcttcatttatctagtttttctttgattttttaatcagagctctgtagttttcctcatatagatcttgaacatattttgttaaatttatacttaaagtatttcactttggagtggctaataatgtaaattttgttgtgtttgtaatttaatatccacttgttcattgctggaatattaagaaagtgattggattttatatgttaatctgtgtcctgcaaccttgctatatatatttattagatccagatttatgtcaattttttcagattgtctacatagacaattatgtcatctgagaacaaagacagttttatttcttccttccttatttgtataccttttatatcattttttaatcttactatgtaagttaggacttccagttaagagattgaaagggaacatccttcttttgttcctgttcttagtgggaaagtttctgttttttcaccattaagtaaaggctagctgtagagtttttgtagatattatttatcaagttaaggaagttcctttttctattcctagtttgatgattttatcattaattgcttttgtattttgtcaaatgcttttcctgcatctattgctatgattatgtgattttggttctttagtctgttgatgtactagaatatgttaattgattttctaaacaagccttgcatagcaagccttgcataactagtataaatcccacatggttttagtgaataattctttgctgtaatgtgtaactggatataatttgtcaaggaattttgcatctatgttaatgagagatattggtctgtaggtttttcctttcaatacaatgtctttgtctggctttggtattagagtgaagctggactcacagaatgaattaggaagtcttccctctgcttcaatcttctgaaaggggttgtaaagaactggtataatttcttgctgaaatgtttagtagaattccccagtgaatccatctgggcctgatgctttctgttttggaagtgtgttagtctgttttgcataaaggaatacttgaggctgggtaatttataaagaaaataattttatttggttcatggttctgtaggttgtgcaagaagcatagcaccagcatttgctgctggtggggcttcagggagcttccactcatggtggaaggcacagaggaagcacacatgtcacactgcatgagagggagcaagagagatggcgtgctatactatagtgaatatgtatagtaaatatgtatatttactaaatatatatgtttagttctatatatttatacatatatttataaacattatgtggcataccttaagtatacacaataaaatttattttttaaaaagattatgtctttgcaggaattggtccatttcatctaggttatcaaatatgtatgggcatagaattatcgctggtattctgttttcttttttatgtccatgggatctgtaataataatccctcttttctaatattagtaatttatgttttctcttatttttttcttagccttgctagacattcctcaattttattgattctttttcaaagaaccagcttttagttttcttgatttttattcattgattacctgttttcaattttattgatttctgctctaatttttattatttttgtatttattttcttctgcttactttgaatttaatttgctcttctttttctgttctgaaagtggaagcttagattattgatctttgatctttcttcttttctaaaatatgtgtgcaatgctataaacttccccataatcactgctttcactgcatctcacaaattttgataagctgcatcttcattttcatttagttcaagatattttaaaatttctcctgagacttattctttgatccatgcattatttagaagtgtgtcgtttaatttccaagtattttgagattttccatatatctttctgttattaatttctagattaattccattgtgttctgagagcatacattgtataatttctattcctttaaatttgttgaagtgtggtttatggctcaaactgtgttatatcttttgaatgttccatgtgagcttcagaataatgtgtattctgcagttgttagataaagtattctatagatgtcatttataacatatccagttgactagtggtggtgttgagtgcaagtatgtcctgattatctgtcactgagtctgttcatttatgatagaggagtattgaagtctccaactatatagtggatccatctatttctcatttcagttccacgtttttgtctcagatattttgacactctatttttaggcatgtaaacataaataattattatgtcttcttgaagaactgaccctctttatccctaataagtttccttgctttgaagtcagctctgtcttagattaacataactactttctttattttgactaggggtatctttctccatccctttacttttagtctgtatattaaagtctgtattagtctgctcagcctgccataacaaaataccacaggctggagttaggcattctgctttccccaggtcaattaggtgctgataaaacaccaatgtgttgggccctggaaaataatttctcttgaggccaggtaggtcttgcaagaacagaatcgttgacataagcaagtttaactatgacttgattttatttgcattattaattaatttgtctgttaggctgaacgtccaaagaacattttttcaagttcactatctttactaggctttatcatgatgttggtatacctgggttgtttggtttcttcatcaatttcccattgttatataacaagttgccacaaatttagcaactcgaaacaagacaaatttattatcttatgtcaatgaaaagagtcaaactctgtaaaatatttgaatagatttattcttagccaaatatgagtgtccatggcccatgacacagccctgaggaggtcctaagaacatgtgcccagggtggtcggggtgcagcttggttttgtatattttagggaggcatgagacatcaattgaatacatttaggaaggcatgagacaaaattgaataaatacattcgtttggttcacaaagtcaggataactaaagcagaggtttccaggctataggtaaatttaaacattttctggttgacaagtggttgagtttatctcaagacctgggatcaatggaaaggaacatccaggttaagataaaggattgtggagaccaagttttattgtgcagaggaagctctcagcagacttcagagagagaacaggttgtaaatgtttcttatcagacctaaaagggtgcctggctcttagctgattatctcctggatctgcaaagaatggaaggaaaacaaaagggggaggggattctttatagaatgtggatttttcccacaagagacttctcagggcaatttcaaggtatggcaaggaaatatattttggggttaaatactttttccttgtttcataatgttatgccagagtcagattgaaaagtaagtcacgatatatagggtcaaataaaacccatctaatgagaactgatggtttgtagggcatgaactccctagacctcttgggtaagaatttggccaagataaaaagtcagagcttaatcctcactacagtatctacgggtcagaagtcttggcagaagttagctggatcctgtgcttattagggtctcactaggttgaaatcaaggagtcagagggggctaccatcttttctgagactactggtcatcttccacattcatgggttgttggcagaattcgattgcttacctctgtaggactaacacctagctttcttgctggctctctgctggaggccactgtcagctcagttttgagagaccactaagccatttcaggccaacagaatagccttgttttaaaagacattataactatgtgtctttcctgaaaatattggtagaggtcattcttttcatgcattacttgttgagttataaatttagtctctgcttaatttttataaaggatttttaacagcattttaagaaaatatagtataaaaaataggatgagaaaattgaggcaaggagaaaataagtacaggtgaaataatgcccaaggtgaacgttatatcccaaactgcataatataaaattctactatatagctgtcctacatttacaatctaagcatgctattaatagttaacaaagcagagaaggaaactgacattccttcagaaaagcttttttcaagcacagaaacctaatcgaaatttcttccatgaatcctcatgaaaagggcaccaagtggtagagtgagcaacattgcaactggcctccctaaataaatccaaaggcatagttccaacacataaactctataaaaatatttaataattgtataagaaaacaaaaatgtggtttaatttggcatgatctaggcatggaatttaaaatacattaaaaaacgcatagactacaaattctttagtaagttatccatgaatagcattactcaaactgagtttttgataaaaattacatggcaaagcattttaagttacattctctggctaaaacctgaaggttatacatggcatgtagggaatagctagaggattatcatgctttgacaatcaaataggcctgcagggatactgacatccccttattaaaatgaggagcctaactaagacttgggcttggatagactttcatccaatgactgtatggagttgattcaaggtagtgactttgggcagagccaacattttactcactcctggggctgatgcaaatatgggcaaatcagtaaatgaaggtctaaattctccatgaaagactatggctgcaagaattttcatatagaaaatgttatgaacaggtgttacaaataaccagagcacccatttataatgttggtgaagtatccatagaacagtgactataaaatcctgaaattaaactatgtttgtcttctgatgattctttacagtaaatcagaaaagcattggtatagatttttctccagcctacttagaagccaaggaatagaaaaatttgtttagttacattggtccagagtttgagattgtcaaggtgtcatgacaaatctaccataaatttcataaaaccaccaaaaggtattagatctggagaacacagcagagttaagaacttgacaattatggtgagggttgaaggacaggcaaaaagggagcaagataatttgagtgataaaaataaagggtccttttgttaaagtaggaaatttctggctttcagtttcctaagagaatcagatccggtggtgagaaatttcaaggtataatcacacacatgaatggctaatgtgaaattaaggaaagtttatagagtagaaaagcttaggaatggtgagtctagagttgctgaggactcaatgtccaacagccaaaatatactcacctacttcaaaagaactatactctgagcttcaattatttgctagttgttatttcctatttacttatgtaagttacttagttaaactggtttgaaaacaatagccagcaaataaagtgcaaattgtttcataactaatacactttgtcaagctaattgaactctacgtgctaaggactttggcatcaacaatgatgactaatagctgaaaagggagatgaagaaaagttaatgtgagggaaaatgaaaacttggatttatagtgtagtccaattgactaaagtttcaaaataatattgacatactgatagtaaatggaaaaaacgaatggtggagaaagcagtcacgatttcacagaaaaccacttccaatagaaataccattttagattgctcatcttctaaatgaatgtttaaaatgcaatttttaagagaaagttttatttccattgtggttactaatgcatctgagtcacttgtatattcttctccagtgtgatgtaaaaaaggccaatgaagaaataaatcactttgataaatacctatgtttaacagaacatcttaggaaggtcatccttaaagaccacgtgttaagttggctgagtatcaatacaatgagtatgcattgattcacaaggaactcatgtccctagggctccagtttctaagagtggtccacagtggtagcttcaagctgaactctgaacgtgaaatgaaatcctatgtcatttgaattttttcttttttttttttttttgagaccgagtctcgctgtgttacccaggctggagtgcagtggcgcgatctcggctcactgcaagctccacctcctgggttcacgccattctcctgcctcaacctcccaagtagctgggactacaggcgcccgccaccacgcccggctaattttttgtatttttagtagagacagggtttcactgtgttagccaagatggtctcgatctcctgacctcgtgatccacccaccttggcctcccaaagtgctgggattacaggcgtgagccaccgtgcccggcctgaactctttttctattctcgaaattgtgagatcctctgacaaattctgctaacagttccaaggtttaaaactggggaagttagagacatgttattattattttttttaatttcaacttttattgtagacacagggagtacatgtgcaggtttgttacatgggtatattgcacccaggtattgagcatagtactcaatgggtagtttttcaacccacatctcccttgctccctcccctgtctagtggtccacagtgcctaatgttcccatgtgtatgtccatgtatgctcaataccataatcctaagtgaattaatgcaggaacaaagacatgtttttgtttttgtttgaatgctacatctggggctggctaggattgagaagacactatgtcttgctgatatgtcagtcgcaacttcagcctcttttgtgtgtgtgtgtgtaaaaaagaaatcttttttatttatttattttcaaattataaattcatagggtacatatgcaggcttgttacatgggtgtattgcataatgctgggtttaggcttctagagaacccatcacccaaatagtgaacatagtatccaataggtagtttttcaattcttgtccccctttccaccctccccacttttggatttctcagatctattttttccatctttatagccaccaacatgagtcttttgatgaaataatgtttggctgaggtccacaacttaaaacaacattccaatatagattctcatgatccctgaagaagtgtgtctgatgtggctaaacatcatcaaatgagtaagtcaacatagtaaaagaaaagaacagttctttatcagattaaatgagcgaaacagctaaatgtcaagtgacaaaacattgggactgactgtataaaatgctaataacatctaccaaacagtttacattgtgctaaacaacttatgcacattatttctttgattctttttaacacatggttgtgggctgaatggtgtctcccaagaagtcatatgccgggatcctgtcccatagtgcctcacaacgtgacattgtttggagttagggttgttgaagatgtcattagtcaagatgaggtcatacttgagtgaggtgggtttctaatccaatgtgactggtgtctgtgaaaaggggaaatgtggacacaggtccacatataaggagaacaccatgtgaagatgaaggtagaaattacagtgatgtgtctacaagccaaggaacaccaaagattgacagaaaatcaccagaagcctagagaggcatgaaacattctccctcagagccttcagaagaaagcaatcctgctggcaccttcatcttggactttgagcctctagaactgtgaggcaatacatttctgttgtttaagccacccagtttgtggcattttgttacagcagcactggaatcctaatggatgctgtattagataaatattttaggcttaggtaggtattttttgatcacttctatgcaatggcttgactattgttctatttgtccctaaatctggttcttcagcctccccagtgattctgtgagctagtgatcatcctttaacagcctttttatgattaagtcacccaggatagtctctgctgcttacatcttcacaggaagaagagaactgtagacatgcagcagccatcttgtggatatgagggaagagccaaatagactacaaatcggttaacacagagaactaaaattgtggagctactgaatgaaccagctatggaattgtctgtgtgtgggcattcagatggacataccggataaaattctggactggtaagagtgtggggaaattgccagtcttaagcagtgctgatggaggtgtgaattggtaaaacaatttgaaaagtaagttgctagtttttataaaatttttaaaaataaatgtattctctgacccagtattatcttttctgggaatctattttacacattaaaaaagcactagattgtcatatactatatatatatatatatgtcatatatagttatacatataagccatatatatttatacacataattatatatctattaaaatacctgaaggaatggtcaatataaagagtatcatccaatttttaaagaagacagggataaaaacccctctgtgctttttggggggatctatttgtatggagcagataaacacatggaaagataagtatcaaactgttgccattggttacttcaagggagtgagtttataacaagaaagtggaagcagataacattaaagttttccttatatgactcagtattatttgactcatttcaataagcatgcattattttttacataaaacacatccggagtggaaaagctttttccaaacactgtcattatgtcatgctaataagtgagttttgggaagcagcatagtccagtggttgtgaacacaagattggagtaacttctggatttaaatactggccttttactaactgtagagtttgagcagaatactttctctttaagtatagctgtcctcatttacaaatggagatggtgatatctgttagtcccctgccttctactgcctgctgtaggacaatttcccattcctttcagcaacccttcagtgaagagaggggccacaaaggcaaaggaatcttagctaataggcactatagcaattttctaaatactttattttttttagagcaattttaggttcacagaaaaactaagagtcaggtgcagagatttcccatatgcttcctgccccacatgcatagtctcctgcattatcaacatctcccaccagagtggtacctttgctacaattgataaacctatatcaacacatcacaatcatccaaagtccatagttaatattagggtttactattgctgttgtgcactctatgaatctgggcaaatgtatagagacatgtatctattaccatagtaccacacaaaagcatttccactgctttaaaaactctgtgtctgcctattaaccctcccaaaccatcatagtaacctatttcatgagagacctacagcttattaccttgctgtgtggaatgaaaactctctcacaaagaataggaattatcttctcttagttggccttggaataagtacagagaagttagcaaatgcagatgcttgaaatctgagcttgctgttaccctgaaaacaaagcacacaagactgccattctttgtgctagcaattttcttcatttgctgtatatccacaaggaatggagaagtgtctttctttttgcctctgtctgaagaaatatacaccataccttatttattcaagtatttgatttaattcataggtataacctcataaagaaagtttttaatccaccctacctaagcctaaaatatttatccaatacagcgtccattaggattctagtgcataggattgcatagaagtgatcaaaaaatacatgtttgagatgaagcatatgttaattaccctgatctgatcactcattctgtcgccaggctggaatgcagtggcgcaatctcggttcactgcaacctctgcttccccggttcaagagattctcctgcctcaggctcctgagtagctgggactacaggcgcacgccaccacacccagctaatttttgaatttttagtagacacgggtttcaccatgttggccaggatggtcttgatctcttgacctcgtgatccacccacctcagcctcccaaagtgctgggattacaagtgtgagcctccgtgcccggtgtttattttttcaatttttaatacattaatttaatgaaaaaataaacaagaccattccaaaatcatggaaaataaaaatgcacactactaccaattctgcaccaaaaaattaaacttgcagtaactgccaactgcctctagataattttttttttttttttttttttttttttgagacagagttgttctgttgcccaggctggagtgcaatggtgcaatcttggctcaccgcaacctctgcctcctgggttcaagctattctcctgcctcagcatcctgagtactgggattacaggcatgtgccaccatgcctggctaatttttgtatttttagtagagacagggtttcgccatgttgggcaggctggtctcaaactcctgacctcaggtggtccacccaccttggcctcccaaagtgctgggattacaggcatgagccaccacgcccggctgagaatttcttactgtgatattgtgaaatatatatttggtatctgcacctggttcctgagacagagctcctaataacctcgtagataggggtgctaagagaatcttttgttctaatgtttggtctctgagcccagttttggcacagagcttctaagacctttataatttcctgagtgctaagagtgtctgacaaagaacttctaaatcccttggaatttcctaggcaacagaagcatcttctgttctaatgaagtgactcttggtgtgtacccggataacctcatgactggagttggttggctgctagaagaacaaatcatgtgattagagtgttggaactttcaaccttagccctcaacttctggggaggggagaagcgcaaaaggtagagttgaccactaatggccagtgatttaactaatcatgcctatgtaatgaagcatccataaaaaactaaagatcacggtgcagagagcttctagattgctgaataagtggtagttcctggaggatgatgcacccagagaggcatggaagctctgtacctctttccacatgtctttgcctatgcatttcttccatctggcggatcatctgtttgctttgtagtattttgtatttaaaaaatggataaatgtaaataaaatgtttccctgagttatgtgagccactatagcaaattaattgaaccaaggagatcatggaaaccccaatttatagctggttgttcagaagcacaggccaaagcctggagcatgtgattggcatctgaagttggggggagtcttgaggaatggagccctcgacctatgaaatcggacactaactccaagtagatagttgggtgaattagaagacacccagctggtgtccactagagaattgtctggtgtttgggaaaaactcacacccagtttggtgaccagagttgaagtgtagtgttgagaatagagagtaagaaaaaagtctgcttttccatcaaaggtaccacgtctgtttctcatactacttgaaggagtctaaatcatactatatgggaaaccgtaaaatgtagcatctaaaagtttacaacttttggtaggaggcagtctgtgcctcccaccaaaactcataaggtatgaattcatcaaactgtattacagagagttttggtgctaggtggcagaaaagaataatcgatgtgtgcagtgtatcttctttttgagtttagccattctactgggtgaaaactgatttcccattctttctcttataacattttcctaatactatgtttaagatatgttttatttcattttcctaatttgtacttttatctttttcaattattaatatagttttgtgctcttaaatttttaatgcaatttatattttggtagtatctaaagtatcaatcattttattattcattcaccttaaaatgtggctatggtttggacatttggattaagtgatgacattgtaattcagccagaactggcagtaatcatcagtgtttggcatgttttgagaacaaaagtcccagttcctggaagggtggccctttatgtgaacacagagtgcacactctgtatggtgtaatccaagacagttgaacggtctgcctgccaaaaatatgccttccaccaggtttttataaagactagtattaccagcttgaaggccattttctgatttagggcattaaaacctaaggaccatgttaaaagactgaaattaacattcactgacttgttcattcattaaacttttttaagttttttaattgacaaataattatatacatctatagggtacaatgtgatgttttatgtatgtgtgtgtatgtatacatgtgtatatatatatatatattttttttttttttttttttttttttttgagacggagacttctctgtcgcccatgctggagtgcagtggcactatctcagctcactgcaagctccgcctcccgggttcacaccattctcctgcctcagcctcccgagtagctgggactaaaggcacccgccaccacgcccagctaaatttttgtatttttagtaaagacagggtttcaccgtgttagccaggatggtcttgatctcctgatctcgtgatccacctgcctcagcctcccaaagtgctgggattacaggcatgagccactgcacccaggcgatgtatgtgtgtattatagaatgattaaatcaagctacttaacatatccataacctcacttacttatgttgtttacatgtgctatgaacatttaaaatccactctcatagcaattttgaaatatacattacattaactattgtcaccatgctgtgcaatcgattttaaaaacttattcctcctatttaaccaaaactttgtaaatatttaatgagtgcctcctattagccagaccctgtttgaggcactaatgacacagagttgaaagtcaagtttgaacctctcttcttaggcatataactgtaggcaaattgtgtcaactctggccagttttcacatttaaaatagagatgataatgctgcccacttaatgggtttgctctaagaattaaatgatattgtttacggtgcccagaaggaaggtaggcccactggcagtcagcgcacgtaatggaccaaggggtctttgaagaaagaacatatccaagtacaggcgatgagcttgtatttgagcacaatggggcaatgttgaatggcagtatgggaggtgctatctgtgatcctcccacagtctgatgacagggccaacaccaaaaggtgtgatctaatcaagcaccaagcgcccacgcaagggtgctgtccaaaccagagacagcctatggggactgccagttagctctgccaaaaaacatccttcctgtccaagtctcccccaagtctctaataagaagagccaccttgaagctttggactccaagcatggctttccggtacaactttaacacagaagtttatattcaattacctacagataccaaaattatcattactatcattattaataaacatacagttaattacaacaaggtacgacaaatctataatagacgtaggctaggctgctatggttgatgagagtatagagggaacagcacttcccaaattggagcagaggaaagaaggtttatagaaggcacccagaggagaaaaaacttgaatcaagtcttcaagaatgaatatgagttattctggagaagaaagtatgtgtgtttggcaggaagtacaaatgcttggagaagacaaattaaatagcacatccaaactatggggatgtgaaagaatgtggagtgttggtagacttatgaaagggtagcgtgggccaggacataacctaaatgtgggagaatggagagaaaggatgctgttcaaattatggatggctttgtgtacgacattgaattgagacattgtgttcaataatataaggagacataaaatgactttcagggtggtggatggtgggaggtcatgattatctgtattttagactttctactcagagagtagtggggaagttgactgaaggagtttaagattagtaaccaggagagccccatcatatcaatgcagtaatctcatggggagtggcaatggctaaagtagtagcagtagcaaggaaggaaacaattagatacacacttgagaggtagaattggcacttgagacaactggctgaagaacaaggagaactcttcaaatattaccaggtccctggcctggacaactgagttgatgtggcattatcaagcatgggatgtagaagaccagggtcagtttgttgattatgtgtagactctgagatgtctgtggaacactattccaatgagacctggagctccctgtatatagtgatattttcaagttgtgacagatgtgtattttaccaactggatgatctccatgtctcatattatcttccccacatgattcttgtgagtatgggcctcaaaaggcacctggtgtgagatttagaagacagaagtgaagtcgcattggattatttttatgctccagaggttggagctgggtatgagatacagtaactacacagtcaagttctacctgccaactcaccttggtggcaacattcagcctcattcctgtataatcctctgttcctgctgtagctccttcttcagcatctcttgggctgggtgaataaaaaaggggactggcttctacaggacacccatgttatcaagggttacttcttagtaagagactgacgtgtgttccagttcatcttcataagccaactcatccagaaggtcccagtttttcctcctgggttctagctcagactgtcaggttccactttgtccatggtttctttcttaaatgcctgctgtgatgacttcaggctgatatagaagaaaagagcctcccatattactattgaattgcctcccaaaactgcaaaaggtcaagtctctatggataatccttactggttcttctactctgattgaagcctgactgacacaacaaatgtgatttttataaacctctttttcattgtatacagcttggtatacatagtccaactatccagacactttggtccctgggaccaaaggttagcagttttagaattccatcagtctagcaccctgctgttcagttagcattaagccagtggcccatctcctcaagctcagaaatcatgtgtacaatagattgaaaatctaaagcaggggttggcctgcattttctgtgaagtgcctaatagtaaatattttaggatttgtagcccataaagtctttattgcaactattctgcttgcaatattgaataacaagcagccatagaaaatatagaaattttaaaatatggctgtgtcacaataaaactttacttacaaaaacaaacagtacagatttggcctatagaccatgatttgacaatgcctaatttagacaaaatagtataagttctttatcataaaagtacatttaaaatgttcacaaatacatttaacattgagaaaaaaaatcatttcaaggtcagacagcctgagatctaatcacagctctgctactctctgatgctccattttctcattttaaatagaggcaagaaagtaagtgcagtgttttaaaatatatccacaagtttattgacatgctgtcttttgaaaggcaacatataattccctttcccctgaatatggacaggacataatgactctaaatgaatagaaagttgcagaaggcgtatttgcataattccgaaggctaagttagaaaaaaagatgattcagcttcaacttgactccctctcaggataatcacacataaaacacaacagccaagctgtgagaaacccaagtggccaaacagaaaggcatgtcgagatgttttgaccaaaggccccaccagaggtcccagccaacagctagcatcatctgccagacatgcaagtgattgggccacagatgattccagtccccaacttttgggataatacaattgatgccaaatagagcagaaatatttgtctacacaaacctcacatagattgcagaaacttaagtaaaataaattttgtcattatctgaaaccactaagttttggggtcatttgttacatagcaatagattgccagaacaaaaggattcccagagactcctcacttattacaataagataattttgtgggaatctccctaatctattgacctgctcacttggatcttcgtaccaaagacaatatatgtgtgcacttgaccattgaagaaagcttctcaaccatcaaggagaagtctgagaaaacaagccagaataccatcaaaagccacagagagaatttaagaggctgaacctaatgatccaacctggaatttgaccaaaactctaggcttgacacttccagctctttttaaaacgatgtcatgggactttcaacaaccagcctagatcaggactacagctggccaaaccatctttatgtgaaatggaacaccactgcagaaaaataggccagtgaattttgaactagaaagtttgggctttaatttattttgagcagaattcttttcaacagaaatgtaaaccaattttaaaagttggcttctaagagacatgaatggctacaggtcagttacaattggttaatttaaggttcattcttaagttcaacattataagatggagtataggaaacagaatgcctacactttttgatctaaatattgggataaaaacctctatggctagaataattctttcataaagacaaagatgatactaagaataaaagagaaaaaagagaataagcctagaaacacgggattgtagtttgatgatatgatgtgtggatggtgggtatgaaaagagaaggcctcggttgtgtaagtgagtaggtgtgagtgaatataaatattgaaattaaagaacaggacttacagagaatggaatatgagaaaattcttcaattacatttctttgcagcaccttctttctttcccaaaactatgtgctttagtgacactgacctacttactcattcttcagtttgccattttttccaaaatgatataactttgctactctaggctctttcatagaatgttcccagagcagtgctttgaagtagaggaaacatggagtcatgcaaccatggattcagaggtcacatctgcctctatcaaactgtgtaaacttgagcctttgttatttacgaccattaatttcaaaacctgtaaaatggggataagatatccagccatatggtgatcatagggttcaagtaaggcaatattcatgaaacactgaccacaatatcacaagacaacatgtaggacaagtttagtaaagattaatcttcccagagcccccaatttactactccgtgacttctacttaggcttcacagtccgatgcagtgtcacctcctccatgcagtccttgccaaagcccccaagcaaaatttggtatctttctccaagctgtcaaagcatcttagtcatattgtatggtcttagtatgattacatgtctatctaccccatgtggatttggactttatcaatttcttgtgtttcgtaccttcatcatgatagtctagggatttctgttttgtaacaaaggcattcatcaagatgacatttacaaaaattagtatgtactatctgagaatgttgaaatgtggattactcagttcttggaagtgtgttagcctgcactgcagagaccatcactctctctctcctctggttcccgtttgcccagctatcacccttaattgatttatgggggaccctgctcttctttatgaccttgcctctcatgttctctcaagttagtttctttttgtaaaactatacctttgctaatgaaataccaccaatggacgctataaggtactcttgaaacatgtaatacaacacattatatactgcccaaaggggtagtactaactacaaaggatgaaaaaactacgactactgtaaaagtttacttttaggaatgtgttttttctccttatgttttaatctcaaaaaaggtttacactccgatccctttatttcaatctacatattcttaaactgctaaatgtctagaaataattataatacaactaatgtttactcagtatttactatggcacaacaccagaaaagctttttatgtgtcatctcattttattgctatggcaaacttacaggagagatattatcattatgccaatttcacagatgaggaagttaaaccatcattagactaattctaattttaaaagcctagtttgcacattatgcactatttatacatggacttatatattgacagaattagctacctcctagggtttatgatattttcattattttcttttctaacatttaggtacataaagagcctatgttaagatttttctagctataaataaagcagctttgtttatatgattgccttctgtcatttgacaggaatgcatataaataggaaaccaagtaaatacattttattaaaaataggaagcagacaaagaaaaagtcaaaaagttcaggatggatgcttcttactgcaggcactgaaggggaggaactgtggcagtcaaagggttacacaagaacttacaacttcctgagcagttgaaataatcaaaaagaaacagaagctatcctaatagtaacatttatttacttttaccaaaatagtaggtgtctaagatctacagtaagctactgatttttgcatttactctactgatttccttgtaataaacagaaaactgatcaaaggcagccttctcaaattacttatatttattacaagattattctaccataacaaacaaatctccaaaatagaaaaatttgatttttgtggaccaaatgttgttatttatacacattcattctcctcgacaggcatattcctttagggtagaggtaaaagcccttaggtgagtgcctatcatggtccattaatgtcttaggccatttgggctgctataacaaagtaccataaactaagtggcttataaacaacataaatttatttctcaaagttctggaggctatgaaacataaagccttctgttgccagcagattcagtgtttgatgaaggctgaatttctggctcatacacagtaatatggttttgttctctgtccccccaaaatctcatctcaaattgtaatcctatgccaaggaagggaactggtgggaagtgattggatcataggggcagtttccccacgctgttctcatgattgtgagttctcacaagatctgattgtttaaaagtatttagcagctcctctatcactcactctctctcctgctgccttgtgaagaaggtgccggcttccccttcaccttctgccatgattgtaagtttcctgaggcttccccagccatgcggaaatgtgagtcaaacctcttttgtttataaattacccagtctcaggtagttctttatagcaatgtgaaaatagactaacacacacagcatcttcttactgtgtcttcacctggttaaaagggtgaggggtctgtctcagacctcttttataagggcattgatcccattcataaaagctatgtacccatgacctaatcacctcccacagcgccccccctcctcccagtcctaatatcatcaccttggggattaggatttcaacatataaatttgggggaacaaacattgagaccacagcagatagcagtgtcttggggggataatgacttggggccctttttaccatatatcaaatggatgctttctccctggtagcttcctaggccattgctctagattgaatccaataagaaatctctcatgagagcaaattccaaaaagcagaccttccggaaggaggacagaagagagagagcatacctgtgcatgtttcagtgggagcaattgccatggagtgtaagaaaaaagagatcttatacccctgtattctgattagttcctccaggaatttttctgttcacatccttgataagatggcttgcacacaaattataaaacaacaacatattgtttgtagatatgattagtgcctatgttggttctattatcctaccaaaactagcctttatagtcatgcaaataaggtatccctaatatactgatgttaataaatttagtggtgttgattagtggtatggccagaagtggacttagaatcataattcatgcattcaaacactcggcaattttgcagtgaaacactatgttgcagtaaaaggcatcatttttgagatcagagagtcctagacttaaatacagcctttgatatttataagatacatcaaaataattaacctctttgcatcttattttccatccatttaaaccaataatagtaatattttccctgaaatactattttgagaattagagataagtgctacaaaattcatgatgctcacatttggaacataataaaaaattattaaaattattgtaaaagaaaaaatacaacagagaaaaccaaaacacaaatggatttaaatgattaacaaaaaccgataaatgactaaaaagattcttttaaaaaggaaggacacattaataaccaattaccaatatcagaaataaatgtgacaatatcactatatatcttacatacatccaaaggctaataagaaaatattttcagcaaatttataccaataaatttgataattgaaacaaaaattttcttgaaataacacaattccccaaaagtgacacaaaaagagacaatgtgaatagcattaaaaaaattgaggtcataatctaaaacttttccacaatggcacaagaaagcttcaaatcaagatggcttcactgatggattctatcaaacatttacaatcagttttatataaactcagaatataggaaataagggactacttcccaaatgatgttatgagatcagcaggactctgatgccaaaatataattagggcattataagaaaagaaattacagatgaatatctctcatgaaaataaatgtaaatattcttatcaagtatttaagtcagatcagcaatatataagaggctaataccttatgatcaagtattcaatattttacatttgtaaatcagtcaacataactgattaacagtataaaagagaaaaatcttatgaacatttcagtgtatgcagaaaacatttttgacaaaatttaacattaattcaggattttaaaaaatctcttagcaaactataactacagagtaactaaatcaatcttacaacaggcatctgcaaagaaacctacagctaacatatttcttaatggtgaaatagtgaaccctttcccagatcaaagatgtctactttcaccacttctatttaatatcatatgtaggtcctgctgaagaaataaggttgttaaaaagaagcaaagtaataaaggttgaaaagaaggaaacacaaatgtattatgagactatatgattatatacatagaaaatcctaatgaatagtattgatattcagaatatccctaatgtcaaattaattatgtgcctagaagcaagaataatatccgttcatttccaatgcattttaccaattaccatattcatcaataaattacacattatatttgaccattatgtgtacctatgaatagaggaagaatattaattcaggaataaaacatatgttgagtattatgttccatacctaccatcacaattagtccctgccctcaaagagtttacagtcttgtgaaatccaagacttaatatgggacttagataacatttacattttacagttaaattcacaattaatatgcatgatggttctattttccatgagtcacaacttaccggtcagcctctgctgttattgtcacaggtaagtcaattgtccccatggccatttactagtcagatgggataataaaaactaaatctgagatgtgacaagtcttgggtagagtacaatgtatggtcctctctacttcacgctataatcacactattgcactacagcctgataccttgtccctattaaaaaaattaagaaagataacttagagggttctacttcttaaactctacagtttgtttgcaggtttctaataagctaagcaagtttgaataatgacatttgagctctctgatttttccttgatgtaattttcccaccaattaaaaaatgattatgagagtgggccataatatgtagccaactggagtttcagaaaacttagcatgtgttaatgtttgagaatctcatttattttttattaacccctcaagaacagagaaaatcttataaatcctgccagaaaatatcagaagtttggaccattttagatggtggtaactgccctagtggcttttaattagccatattgtgcctaccatttagaatgtttatttttgctcttggaagattttcagaaacaattaataagagccaaaccatttatagatgcacataaccaaaccaaaatcagagtattcacaaacatgttaacccaagtatgcagatcaaacaaaacattaaactaggcacacagaaccaaagtgcatagatggggggacctctctccaagccaagggaagcagtgagggactgtgctacccaccaggggtactacactttttccacagatttttgcaatccatggatcaggagattccctcatgagcctacaccaccagggccctgagtctcaagcacaaaaccaggcggctgctcaggcaggcactgagctgcaggagtttttacctactgcagtggcacctgaaactccagcaagacaaaagaaccatccactcccatggaaacggggctgaagccagggagccaagcagtctcgctcagtgggtcccacccccatggagtccagcaagctaagaactactggcttgaaattctcactgccagcacagaaatctggagtcttcctgggatgtccgagttcccagggggaggggtgaccacaattactgtggctctagtcagtggttttcctctgacagtgctaaggagactgggaggtttagactgggtggaattccccacagcacagcaaaatggctgtggccagactgcttctctagatccttcatacctggaaggaggaagtccagcagctccaggggcttacagacagaactctcatctccctcggacagagcgcctggggggaggtgctgccgtggcctcaggttcaaagggcttaatctttcctgcctgccggctctgaagagaacggctgattctgattaggtggattcgcccagcatagcacaccagctctgctaagggagagactgcctcctcaagtgggtccctgatcccatgcctcctgactgggtgagacctcccaacaggggtggacagacacctcatacaggagagctccagctggcatcaggtctgtgcccttctgggacaagcttctgcagaagaagcaggtggcaatctttgctattctgcagcttccactggtgatacccaggtgaacaggatctggagtgaacccccagcaaaccgcagcagacttgcagaagaggggcctgttagaagaaaaacaaacaaacagaaagcaacaacaacaaccacatcaacaaaaaaagaccccataaaaaccccactttggatttccgtaacctcacagaaatccaaaggtcaacagccagcctcaaagatcaaaggtagatgaatccacaaagataagaaaaaaacagcacaaaaatgctgaaaatcccaaaagccagaatgcctcttttcctccaaatcatcacaacacttctccagcaagggcactaaatagggctgaagctgagatggatgaactgacagaagtggcttcagaaagggggtaataataaatttcactaagctaaagtattatgttctaacccaatgtaaggaagctaagaaacatgataaaagattacaggagctgttaactagaaaaaccagtttcaagaggaacataaatgacttaatggagctgaaaaacacagcaggataacttcgtgatgcaaacacaactatcaatagccaaatcaaccaagtggaagagagaatatcagagcttgaagacaatcttgctgaaataaggcaggcagacaagattagagaaaaaagaatgaaaagttgtgaacaaaacctcaagaactgtggggccatgttaaaagaccaaacttacgactgattggagtacctggaagagatggggagaatggaaaaaagttggaaaacacatttcaggacatcactcaggagaacttccccaacctagcagaacaggtcaatattcaaattcaggaaatccagagaaccccaataagatactccacaaaaaggtctaccacagcagaactctcagtggaaaccccacaagccagaagagattgggggccaatattcaacattcttaaaaaaaagaagttccaacctagaatttcatatctgactaaactaagttttataagcaaaagagaaataaaatctttttcagacaagcaaatgctgagggattttgccagcaccaagcctgccttgcaagagctcctgaagtaaacactaaacatggatagaaaaaaacgttactagccgctgcaaaacacactgaagtaaacagagcaatgacactatgaaacaactacattaacaagtctgcaaaattaaccagccagcatcatgatgacaggatcaaattcacacataacaatattaaccttaaatgtaaatggactaaatgccccaattaaaagagacagaatggcaagctgaatacaaagacaagacccattggtgtgctgtattcaagagacacatctcatgtgcaaagttgcacatagactcaaaataaagggataaaaataaagggatggaggaaaatttaccaagcaaatggaaagcagaataaagcaagggttgcaatgctaccttctggcaaaacagactttaaaccaacaaaggtcaaaaaagacaaagaagggcattacaaaatgttaaagaattcaattcaacaagaagagctaactatcctaaatatatatgcacccaatacaggacaacccagatccataaaacaagttcttagagacctacaaagagacttggacccccacacaataatagtgggagagtttaacaccccactgtcagtatcagacagatcactgagacagaaaactaacaaagatatttaagactcgaactcagctctggaccaagtggacctgatagatatctacaaaactctccaccccaaaacaacagaatatacattttttttcagtgccacatgacacttactctaaaattgatcacataattgaagtaaaacactccttagcaaatgcaaaagaactgaaatcataacaaacagtttctcaggccacagcgcaatcaagatttagaagcccactcaaaatcacacaactacatggaaattgaacaacctgctcctgaacgactgctgggtaaataataaaattaaggcagaaataaaaaagttatttgaaaccaactttgagaacaaagagacaacatatcagaatctctgggatgtaaagcagtgttaagcaggaaatttatagcactaaaggcccaattcaaagagccagaaagaggctgggtgcggtggctcacacctgtaatcccagcactttggtaggctgatgcgggtggatcacgaggtcaggagatcaagaccatcctggctaacacggtgaaaccccgtgtctactaaaaatacaaaaaattagccaggcatggtggtggtgggcgcctgtagtcccagctactcgggaagctgaggcaggagaatggcatgaacccaggaggcagagcttgcagtgagccgagatggtgccactgcactccagcctggacgacagagcaagactctgtctcaaaaaaaaaaaaaaacaaaaaaactagaaagatcgcaaatcaacaccctaacatcacaactaaaagaactagaaaaccaagagaaaacaaactccagagttaacagaagacaagcaataaccaagaccagagtggaactgacagagatagagaaaagaaaaacccttcaaaaaatctatgaatctaggggctggttttctgaaaaaaaaaaaaaaaatcaataaaatagactgttagcaaaactaataaagaaaaaaagagagaagattcaaacaaacacaatcagaaacaataagggggctatcaccactgacctcacagaaatacaaataaccatcagaagacactataaacacctctatgcaaataaactggaaaatctagaaaaaatgggtaaattcctggacacatacaccctcccaagactagaccaggaagaagctgaatccctgaatagaccaataacaagttctgaaatagaagcagtaacaaatagcctaccaactaaaaaatatcccaggtccagatggatttacagctgaattctaccagaggtacaaaaaggagctggtagcatttattctgaaactattccaaacaattgaaaaggagggactcctccttaactcattttatgaggccagcatcatcctgatacgaaaacctggcagagatacaacaaaagtagaaaacttcaggccaatatgcctgatggacattgatgcaaaaatccttaataaaatactggcaaaccaaatccagtagcacatcacaatgcttatcaaccaccaccaagttggcttcatccctgggatgcaaggctggttcaacatatgcaaatcaataaatgtaatttatcacataaacagaactgaagacaaaaaaacacatgattatctcaatagacatagaaaaggcctttgataaaattcaacatcccttcatgttaaaacctctcaacaaactaggtattgaaggaatatacctcaaaataataacagccatttatgacaagcccacagccaatatcatactacaggggcaaaagctggaagcattctccttgaaaactggcacaaaacaaggatttcctctctcaccactcttattcaacatagtgttgaaagttctggccagggcaatcaggcaagagaaagaaataaagcgtattcaaataggaagagaggaagtcagattgtctttgtttgcagatgacataattctatctctagaaaccccatcatctcagcccaaaagcttcttaagttaataagcaactttagcaaagtcccaggatactaaatcaatatgcagaaatcataagcattcgtatacaccaacaacagacaagcagacacccaaatcatgaatgaactcccattcacaactgccacaagagaataaaatacttaggaatacagctaacatgggaagtgaaggacttcttcaaggagaactacaaaccactgctcaaggaaatcaaagaggacacaaacagatggaaaaacattccatgctcttagataggaagaatcaatatcgtgaaaatggccatgctgctcaaagctatttatagattcaatgctatccccattaaactaccatcaacatttttcatagaattagaaaaaaatttaaaagttatataaaaccaaaaaagaaatcgcagagccaagacaatcctaagcaaaaaaaaaaaaacaaaccaaagctggaggcatcacactacctgacttcaaactatactacaaagccacagtaaccaaaacagcatggtactggtacaaaaacaggcacatagacaaatggaacagaatattgaactcagaaataacaccacacatccataaccatctgatcttcaacaaacccaaagaaaacaagcaatggggcaaggatttcctatttaataaatggtgttgggagaactggctagccatatgcagaagattgaaactggatcccttccttacaccttgtacaaaaattcactcaagatggattaagacttaaatgtaaaacccaaaactataaaaaccctataaaaaatctaggcaataccatacagcacataggcacaggaaaatattttataatggaagtgccaaaagcaactgcaacaaaagcaaatgggatctaattaaactaaagagcttctgcacagcaaaagaaactagcatcagagtaaacagacaacctacagaatgggagaaaatttttgcaatctactcaactgacaaaggtctaatatccagaatctacaaggaacttaagcaaatttacaagaaaaaaacaaacaatcccatcaaaaagtgggtaaagaatatgcacagacacttctcaaaaaaagacatacatgtggccaacaaacatatgaaaaatagctcaacatcactgatcattagggaaatgtaaatcaaaaccacaatgagataccatctcataccagtcagaacggcaattattaggaagtcaagaaacaacagatgttggcaaggttttggagaagtagggacactttacactgttggtgggactgaaaattagttcaaccattgtggaagacactgtggagattcctcaaaaattcagaaccggaaataccatctgactcagcaatcccatcactgggtatatacccaaaagaatataaatgattatattataaagacacatgcatgcatatgttcattgcagcactattcacaatagcaaagacatggaatcaactcaaatgcccatcagtaatagactggataaagaaaatctggttcatatatattgtggaataatatgcagccataaaaaggaataagatgatgtcatttgcagggacccagaagaagctggaagtcattatcctcagcaaactaatgcaggaacagaaaaccaaacaccacatgttctctcttataaatgggagctgaacaatgaggacacatggacacaggaaggggaacaacacttttactgggcctgtcagaggagggaggtggggaagaaagcaatagggaaaagagctaatgcatgctgggcttaataggtaggtgatgggttgatagttgcagcaaaccaccatggcacatgtttttctatgtaacaaacatgcacatcctgcacatgtaccctggaacttaaaaaatacaaataaaatacttatttttaaaaaaagacagagttgccagtggcatttaaaaaaaaaaattcattcatctgctgtcttcaagagatccacttcacatgtaatgacatacaggctcaaagtaaagggttgcagaaagatctaccatgcaaacggcaaacaaaaaagagcaggggatgctatttttatatcggatgaaggagattttcaaactaacaacagtaaaaaagaacaaagaaggacattacataatgataaagggttgaattcaaaagactaacctatcctaaatatatatgcgcccaacactggagcacctagattcataaaacaaattcttggagacttattaagagacaccaataaccacacaataatactgggagatttcaacaccccactacaattttagacagatcaccaaggcagaatactaacaaagatattcaggacctaaacttgacacttgaccaaatgcatctaatgacatctacaaaacactccacccaacaaaaacagaatatatattcttctcatgtgcaaatggcacatactctaaaattgaccacatgctcggccataaatcaagtctcaaaaaagtcaaaaaactttcaaaatcatatgaaccacactcttgaaccacaggacaataaaaatagaaaccaataccaaaaaagctctctcagaaccatgcagttatatggaaattaaacaatatactcctgaatgacttttgggtaaatagtgaaattatgacagaaatcaagaactaatgaaactgatgaaaacaagatacaacataccagaatctctgagacaccactaaagtagtgataagaggaagtttagagtgctaaatgcccacatcaaaaaattgaaaagatcttaaattagcaacctaacatgacacatagaggaaacagaataaaaagagcaaaccaattccaaagctagcagaataaaagatataatcaaaatcagagctgaactgaatgaaatgaagatgagaaaaaacatgatattccaaagatcagaatgaaaccaaaagttaattttttaaagaataaataagatttatagacttataactagactaataaagaaaaaagggagaagatccaaataaacacaatcagaaatgacaaagggagcattaccattgatcccacaaaaatacaaaaaaaaaaaaaaccctcagagaccattaggaacacttttatgcacacaaactagaaaacctagaagaaatagataaattcctggaaacatacaacctcttaagataaaaccaggaagaaactgaatacctgaacagaccaataacaaattctgaaattgaatcagtaataaacagcctaccaagcaaaaaaaaaaaaaaaaaaagcccccggaccagaacgattcacagccaaattctaccagatgtatacagaagaactggcaccagtcctattgaaattataaaatattgaaagggagagactcctctctaactcattctatgaggccagaatcattttgataccaaaatctagcagagacaccacaaaaaaaaaaatttaggccaatgtgcctaatgaacatagatgcacaaaccctcaacaaaatgctagcaaaccaaatccagcagcacatcaaaaagctaatccaccaacatcaagtaggccttatttctggggtgcaaggttggtccaacatatgcaaatcaacacgttattcactacataaacacaactgaaaacaaaaaacatatgatcatctgaaatacatacagaataggctttttctaaacttaacatcccttcatgttgaaaattctgaacaaactaggcatgaaggtacatacctcaaaataataaaagctatctatgacaaattcacagccaacatcatactgaacaggcaaaagctggaaacgttccccttgagaactgggacaagataaggatgtctgctctcaccactcctattcaacataatactggaagttctagccagagaagtgaggcaagagaaagaaataaaaagcatgaaaataggaagagagctctccctctccctctccctctccccatggtccccctctccccacggtctccctctccctctctttccacggtctcgctctgatgctgagccaaagctggactgtactgctgccatctcggctcactgcaacctccctgcctgattctcctgcctcagcctgccaagtgcctgcgattacaggcgcgcgccgccacgcctgactggttttcgtacttttttggtggagacggggtttcgctgtgttggccgggctggtctccagctcctaaccgcgagtgatctgccagcctcggcctcccgaggtgccgggtttgcagacggagtctggttcactcagtgctcaatgatgcccaggctggagtgcagtggcgtgatcgtggctcgctacaacctccacctcccagccacctgccttggcctcccaaagtgccgagattgcagcctctgcccggccgccaccccgtctgggaagtgaggagcgtctctgcccagccgcccatcgtctgggacgtgaggagccgctctgcctggctgcccagtctggaaagtgaggagcgtctctgcccggccgccatcccatctaggaagtgaggagcgcctcttcccagccgccatcccatctaggaagtgaggagcgcctcttcccagccgccatcccatctaggaagtgaggagcgtctctgcccggccgcccatcgtctgagatgtggggagcacctctgccccgccgccccgtctgggatgtgagaagcacctctgcccggccgtgaccccgtctgggaggtgaggagcgtctctgcccggccgccccatctgagaagtgaggagaccctccacctggcaactgccccgtctgagaagtgaggagcccctccgcctggcagccaccccgtctgggaagtgaggagcatctctgcccggcagccaccccatccaggagggaggtgggggtcagcccccgccaggccagctgccccgtccaggagggaggtgggggggtcagccccccgcccagccagctgccctgtctgggaggtgaggggcacctctgcccagccgcccctactgggatgtgaggagcccctctgcccggccaccaccccctctgggaggtgtacccaacagctcattgagaaccggccgggatgacaatggcggttttgtggaatagaaaggggggaaaggtggggaaaagattgagaaatcggatggttgccgtgtctgtgtagaaagaagtagacataggagacttttcattttgttctgtactaagaaaaattcttctgccttgggatcctgctaatcggtgaccttacccccaaccctgtgctctctgaaacatgtgctgtgtccactcagagttgaatggattaagggcggtgcaagatgtgctttgttaaacagatgcttgaaggcagcatgctcgttaagaatcatcaccactccctaatctcaagtacccagggacacaaacactgctgaaggccgcagggtcctctgcctaggaaaaccagagacctttgttcacttgtttatctgctgaccttccctccactattgtcctatgaccctgccaaatccccctctgcgagaaacacccaagaatgatcaataaaaaataaataaaaataaaaaaaaagagagagagagattaaaagtcaaaaaataaaaaaaaaataaaaaacataaaaagaaataaaaaaggaggatgtaagaataatttaaggtatattatgcaagtatccacaaaatgaattttaatagaaaataaatttaaattctgggtacccatgcctaatatttccaaaaaaaaagaaaataggaagagaaattcaaactatctctctttataggtgatataattctatgcctagaaaacccaaaggctccaagatttgataatcaacttcagcaaagttttaggatacaaaatcaatgtacaaaatcagtagcatttctatacagcaataatgtcaaagctgagagtcaaatcaagaacacaatcccattcacaacagccataagaagattaaaatgcctaggaatacagctaatcaaggaggtgaaggatctcggcaatgaaaattacaaaacactactcaaggaaaccagagatggtacaaacaaatggaaaaacatttcacgcttatggatagaaagaatcaatattgttaaaatgaccatacttcccaaagcaaattatagattcaatgctattcctatcaaactcccaatgacatttttcatagaattaggaaaaaaattctaaaatttacttgaaaccaaaacaagagacaaaacagccaaagcaatcttaagagaaaagaacagagctggagacatcacactacccaacttcaaactatagtacaaggccataataactaaaacagcatggtactggtactaaaacagacacgtcaaccaatggaacaggttagagaacccagaaataaagccacaaccctacaactatctgatcttcaacaaagctgacaataacaagcaatggggaaagacttcctgttcaataatggtgctggggtaactggctacccatatgcagaatattaaaattgaacaactacatttcaccatatataaaaatcaactcaagatgcattaaagacttaaatgtaaaacctaaaacaataaaattctgagtagaaaacctagaaagtaccattctggtcatcagccctggtaagacttcatgaagaaaatttcaaaagcagttgcaacaaaaataaaaattgacaagtggattaagctaaggagcttctgcacagcaaaagaaactatcaacagacaacatatagaataagaaaatatatttgcaaactatgcattcaataaatatctaatgtccagaatctgtaaggaacttaaacaattgaacaagaaaaaaacaaataactccattaaatggacaaaagatataaacagacacttttcaaaggaagacatacatgtggccaacaaatatagaaaaaaaaatgttccacgtcactaatcatcagagaagtacaaatcaaaaccacaatgagataccatctcacaccaatcagaatagctattattaaaaaataaaaaataaagaacagatgctggcgaggctacagagggaagcaaatgcttgtacactgtttcttccagccactgtagaaaccagtctggagatttctcaaagaacttgaaacagaactaccattggaaccagcaaccccattactaggtatatatgcggaagaaaacaaatcattctaccaaaaagacacaggaactcacgtatttatttcagcactattcacaatagtaaagacatgtaattaacccaagtatgcctcaacagtgggttggataaagaaaatatggtatatatataccatggaatcctgtgcagccataaaaagaacaaatcacgaggtcaggagatcaagaccatcctggctaacacggtgaaaccctgtctctactaaaaatacaaaaaaatagccaggcgaggtggcgggcgcctgtagtcccagctacttgggaagctgaggcaggagaatggcgtgaaccccgggggacggagcctgcagtgagccaagattgcgccactgcactccagcctgggcgacagcgagactctgtctcaaaaaaaaaaaaaaaaaagaacaaaccattttctttgctgcaccatggatgcaagtgaaggccattatcctaaacaaattatgcaggaacagaaaaccaaatatcacatgtcctcacttataagtgggagctaatcattgggtactcatggacacaaagatgacaacaatagaactgggcaatactagagggggaaaggagggatggtcacaaaagttaacaaactaactattgggtatcatgctcactatccggatgatgtgatcattcataacccaagccccatcatctcgcaatattcccagataacaaacctgcacatgtacccttgaatctaaaataaaagttttaaaaaagagaaaaacaacaaaacaacaattgactttaaaaaataaagactttgtgttttatccaaatgattttctttgttgtctttattagatttttgattatttaggaaaattgagctttaaaaaagttaaggactttttacatctatttaactttattgcttttgcagtttttttaattataaccctgattaaatgagtaactattgtttcaccgcgacttatgatcttgttttgatcaagtgttttaagcacttaatagtgcttgaaagtgcatctttcataggcttccccaatatccaaattcaaaattaagtctttttaacctaaagttagcttagaaactttcttgttggtgccctgaagatcttcaaaggatgtatgtattcatttgtgtagataataaatgattcatattatttagtaaattatatgagaagtattattgtcagttacatttatgggtatgttattgatataaatgttccaaacttgtatgaaaatcttaaaaatctgatatgacatcagaaataattctggttattatgttgtatccataaaaaataaccaaagtcccctgtcaattgctaattaaacttccattagatttttaaccattgctattttaagtctctgtcacccacagttattgtttttctttttcagtaaaagtatttgcactcagattgatggaaaaaagtctaagtatacttaaatataagtttctaataactctaagatttatgaacataataaaaattttccagaactctaagaaagaaattaatgggttcctgcaactgcaaattaagatcaaacaaaatttaaaaattaattatatgatatgaaataacatctgaagataacatttttataacttttatttgaaacattcttggttcttcggtgttctgtttttcacatttagggaaattttctctcttaagctatctattgtttacatcagtttggcaaagcacatttttatgaacaaagctggaaacatttgctttttctccttacttgatcttccaaaattcaaaagttatccatgagtattatttttttggggggacaaaatcattattttcagaagtttaataagaatctacattctttataacaagatacaattggaaacactggtgacattaccaaggttttgattaaaatgttatatctgagaacgtgcattgaatgtctaacttcaagaattcataaccctacagtgaatgaataaaaactgtcaattcctggcatgcccagaaaccttaagactctgggtagaatctaaagtctgttttgctttggctttctagcctctagaggcctcttaaaaacctcctgaggtttttaaatctgagattcctatatgatcaatgtagagagaaaaagttatgttcctaaaagaaagactatactatacctattaatagactgtagccctgtgcatcattttaaatttcttttcatctgtctgtagtaggctggaccaaatcctaaattattctaggttcctctttccaactttatttcacaaaattactaaaaatgaaagcttctgtttctgaagccctattagctgaagctagataaattttaagaggcaagtcttgtgcctgatgtatgcctcatacaaaacgttcaccaaactgcttaatgacataaccagagacattcaaactgcaagccagtataagaacttgacagcttcacactctagacagcttttctcaagatgtcaaaataagattccacatcataatgagactctttcctctcttaatgcctatctttttcacttggcaggataatgttcaatgcatttattcaactggttgcctgtaagcctaaatacttggctcgaaaccattatgcaaactgagattgtaatattactattaattttactttgtattttccctttttaaactttatatcattatttgttaaatttttgctgaagtacaactcttaacagaataatgctggcccagcactttgagatgatagtaacaaaattgaacttaacaatggactccaagtagacttagcctgagagccacatcccttcaaacctcccttactgctcaaaggtggctaaaagggtttcgacactgcttctagctgtcattcactctctccagcatggacccagaccagcaaccagagacaggttcatcccagcactgaagaacaattaaaacctaactacaggatgatttgctagagatgcttctggggaaaaattttgatcaaaagaggaaacattaaagttgtcagaatcaaaatagagtcacctatgatacatacatacacacacacacacacacacacacacacacacacacacactagagctgggaaatgccatgaaaggagatttctcatgcataaatgggtgacaagaattagcgcaaagactctgcaaaaattacaacctagcaaaaaggctatcacaagcctacacacacacacacacacaaatacttctataaggacatctgcccagcaactgcttgtccaaccttggactgcagccactctttttgagacggagtctcactctgtagcccaggctggagtgcagtggtgcaatctcagctcactgcaacctctgcctcccgggtcctggttcaagcaattctcctgcctcagcctcctgagtagctgggattacaggcctgcaccaccatgccccactaatttttgtatttttagtagagatggggtttcaccatgatggccaggctggtcttgaaatcttgacctcgtgatctgcccgcctcggcctcccaaagtgtggagccactcttattgatccttgtggccacggatagataattgtcccaaaacagttatgtaatcctccctatttttcctttaaagtactctttctttacctctctgcatatacacatagtttaccatggcacgcgtatttccattgcaaacctctatttttaagaaatataattttctttcagagaccctctctcttatttaggttgaaaattcagcatgccccatagtaaactgcaagaaaatccttgaacaaggagaatcggtgtgcttttattgaaggcagcaaagaagcaggtgtttcgggagactattcctcacgctgaagtcaatggacagagaaaagaactggaagatttctcaagcagaaatgatcaacaggctgagttttggcatctgttttatgcttcaagaaagaaaaagaaggaattggtccagatatagggaacccaaatgccaagcagttgaaagtaggtgaagtatgtgcagaacccccacccatgtgacagaagaacaatgacttgagtagttaggtagagcactgtctctgcccccccaccccaccatttatggcttaggttgtacttcttaataaacttgcagatcatggaaaagccagagctttaggtgatgaggctgcagccagtacaagaggtattgtcagaaatcacaaaaaaaaaaaacaaaaaaaaccacaatggttatttcagcaggcgtaactggaaagttatagaggatatagtttcatttctttcattgtataatttcatgggatttaatgtaatgcaatattagtcatttttacttttttgtatgtgttcttttgtatttttagaagacagttattaaattagtatcatcagagtcagcaaaatagaatgtgaaaagtgcaagacaagtatgacatttctaccttactgccattccaccatacaaggcactcttctgagctcaattactatttgagccaccaaactctcttaccttgctctgtttctattagtatttccattattatatttattatttatattactataatacataatataatacatattatatgatgatttttaattttatattttataactataatgaagataaacagtatcatattattacaaattattaattattctattttattattgtatcttattcagtcactttcccttgctttgatccataatagcccttgcatatttcaatatcttatactccaaaatatatgcatttggggtgagttagataaataagtccatttctataggaaataaaattttagtttacaagaattgaaaagttgctccctctcatatgagtagaaatcactccaggaaaaaatatgcaactcaccctaaaatgctgcaagacctgcctttggcagtgacgttttttttgtgctgtgtattcactaaattctttggagccctgttgtatggggcagaacatttggatatgttttgataagtcaagttcagtgtgacctcttatgctctcaattattaagaagattactagcttaaaatgtctacaaatattttgtagaagggaagacaaatggctgtaagcaacaagataaataattactattccaaaactgaaactaatcaggttggaaaaggtaatttattgctccaaaaatgtgcaaaaggagatcacatcagcatagattgatgaaagtattatcaaataattgaaatatcttgcatgtgatcattatttgggacacactgatagttttcaatatgattttttcatattaactatcaatgtgttaatttatttccttaaataaaaattagttgcaaaaagcaaccagaatgttattggtgattgattagtcaaaaaaaaaagcccaatgttctttttgtcatacaaacaaaatttggttctggatggtcatggaagtaggtaagctaaagcatatagaatttaaaagctgaagagactggaaaattagagctgtcttcctgaaactgagtaagttcagttgatttttgaggaagtcatgaaatttggggagggttactggggtgatttcgaggagacccagagaaaaggtttaaacacatttttataacttaaagaaaataatcaaagtatgtttaatactgtatctaaaagtgtaacattgaagccagacaagagtgaattcaaaacccagcttccagggttgcttctcatttcttatctcatttattattgcacatgccaatttaatggcaattgcacatgccaatttaatggcaattgcacatgccaatttaatggcatgtgcaataaatgagagagaaatgagaaacaattagctattaatttttactgttgttacataaagatgagtttttgttgttacataaagatactttttattatgataattaagagtctaaaaaagatattgctattcacctatctgatgatgttttttattaagcctacatttaacaacatattttcctcccaaggacaaaaacttaacattttactgcttcttttaaccttccctttgtttcttttactcttaacaagataactttattcttctccctaaagatgatcaagctttgcaggataaatcagagaaagttcagcacctgctcccaccgtgatgtgttttgcagcttctaagagaaaggagtacagggatacttgtcctggtcactctctgtaactcccgggacagagatagcaccagcaagagtccctgtacaatgatcttccactgtgggaaaaaaatatataaaataaaataaaaactgtttatatcagctgattcattcatatgtttttacaaagtaccaaacacttattgaacaactactatatgccaggacactgtataagggcagatgattaagtgtgtgtgtgtgtgtgtgtgtgtgtgtgtgtgtgtgtaaaacacagtaactgtttttcaaagtgactcatggcccaagttttggacagaaatatgctttcaatatgttacattattcagttattttgactttatgttgcacctaggattttaatccactcaatatgaatgtggaatataataaaacaatagctttttattaataaaattaaattgtggcattatcataaaatacaagattgagttcctaatgtttacactacctatcttaaacattttgtgaaagcaagctaatacaaattcaatatcactattaaacaagttcataaattcattgaaaattatataattatagaataaactgaaaatgttatcaaagactaccttcgaaaggtgacaggtagtttcagaggtgaatttcttcaaatgctgatatataattcttgtgttatttaagctattttttatcttacagaaagaaagtaaattctttatgtaaaatcatattagtaatacaaaaacacaaaaactatagacagtcatcactgagtatgggtttttaaatcctaagtaaaatatctgtaaatagaatcttgtagtaaaacttataatttgtcacaattgtaaatcaaaagaaaaaaattatatgctcctagtaggaactgaaaacttaatttgtaaaatttagcttccattcttagttatattttttggaaaaaaacctatatataatatgaaaataaatatgcacacatatataaataaaataaagtcatgcctaatggtgagattaaaacattaatcttactaaattcagcaaatggcaaagatgcctataatttttattattattcaacattttcctacaaatgttaaatgctatatttcctagccaatgaaatatagcattaaaaaataaatgagatttaaaaatattaaagagcagaaggaagcaccattgcaattatcaatgctacaattatatatctacaagccccaaatgaaaatcaacgaaaaatagtaagctcagaatggtgacaaagagcaaacttaaaatagctataaatcagcagtcagttggagtgtcccagtctcttgaaattcagttaaaatgagccattttatgcactgttgaagctcaaagcttacctcaattcgtttttaacttctaagaggtttatgttctcatcctcacatttgaccctgggctcttgtttttgtatatgctgtgtttctttccttactatatcattttacttgagtctgaagatcataggaaatattgaatatataggttttaaaatagaagtgtgcacagaaacataatttatgaatttactcatttttcatccatgcaaaaatcagataacagttataaaactgttaaataaaaaaggaaaacataatctctcttcaatttttgactacttattgcaggataaatggtataatatttaaaactgaaacaggaagtctcttgtccctcatttggtagagtgcttattttataagttttaaatttactgaaatgaaggaaattgtcaactctattaaagaaatactcatgctattggaatctttgtaaaacaagatttctcttttatatctcttggaaattcttactacagatatgagaaatatttgaattgagtgtttaagctgtaaataatgtgatcatcatttcatgatcacattaattcagtgttacaaaaccatgtattttcttcatttttatttcacttcagatatcttaataaactgatctgcctagctcagcgttccttgacaagctgtgaatgttttaaattactaaaactatacttaaaatgtcttctacagaatacagggcagagatttattcttgggaagaatatcctaagggaaaaaatgttgcttaaagtagttcttgtagaagaaatacttttgagtagatcttttaaaagattttaattaatttaaaatccagtaattaaccagaaaaaatatttgaaaatgatgcaacataaattttaagcacaaagctcattaaaaaaattttaattttcttttaagactctctttttttagttattattgggttgattctatgtgcctgatatcaaccctgtgttctttgatctggacaaattcttcaagctagttaactagtcattattcaggacagtaacacaaagagaaagagaaaataactgatatttactgagtacttacttaacacttgggcttctaccaagcacttttacatgtatatttttatccacatggtcatagagcactgagcttaagaaacctggataagattaggtgaagccagagtacaaaataggtatcaatagatataatgagatttattataaggtattataaggtatgggctcacatgattatgaaggcagagaaccaccatgatctgcattcaacaagctggagacccacaaaagccagtggtgtaatctgaaggcctaagagttgagcagagagcaggagaaaaccaatggcccagttcaagcagtcaggtggagagtgaatttaaccttcttcctcttctttgttccatttaggcccttgaccagttggttgatgccagtggtggactgagtaaggcagatggctctgtttcactctgcttttacccagtctaccaattcaaatactactcagtttcaaaaagacttttacaggtacaccagaaatactgcttgaccagctatctgggcatcctgtggcccagtcaagttgatacgtaaaattaaccatcacaatcactgtggattttttttgtctttttaattgaggtattatttacatccaataaaatgcagagttctttagtatatagttcaataaattttgacaaatgtatatccccacataactaccacccaatgaagacacagacatttccatcaacgtagagtttccttccttcctttttccagtctatctcactccatactgcctcaaaggtggttgcctctgtttttatttctgtaatgttacataaagagaaccacatagtatgttctccgtgtttattctttcactcaacataaagtttctgaaatgcatccatgttgttccacatataggcagcttgttccttttatcattgagtggtaccctttgtatgatcacaccacacattgtttaattattcaccagttgattgatatttggatttttttctgtttggggttatcatgaacaaaattgtaatgagcattcttggataaattttttatgagtatatgttttcattgctctaatataagtacgtaggaaaagaatctctgggtcatattgtaaatatatgtttaatgttataagaaactgccaaactattgccccaagtgtttgtaccattttattccccaaccagcatatatgagttccagttgctccatgactctgtcaacagtactgtcagcccttttaatttcagcctttcttggggttaagtgctatctcattgcagtcttcaggaaaatacatttccttgaatattaatgatattgactacctttccatgagtttattggccattcataaatttctcttgtgaagtatctctttcagtttttttccctattttaaattaggtttgtcttttattattgagatttggaatttttaaaatatcaacacaagttatttgccagatatatgtatttttaatatatttctctatatgtcttatccccattttcttaatgatgtctttcataaatagaattttcatttttataaaattcaatttataattttttatggtttctctttattaatcccatttaagaaatctttgtgccatgattatgaagatgcactctaatgttttttcccagaagctctgtaggtttagcttttacctttctgggtttgttttgttttgttttttgagatggagtcccactcgtgtcacccaggctggagtacaatggtgcaatctcggttcactgcaacctccacctcccgggttcaagcaattcccctgtctccacctctcgagtagctgggatgggaggcgcctgccaccatacctggctaattttcatatttttagtaaagatagggtttcaccatgttagccaggctggtctcgaactcctgacctcaagtgatccacccgcctcagcttcccaaagtgctgggattacaggcgtgagccactgcgcccagccctagctttttggtctatgattcctcccaaattaatttctgtgaaccattaccttaagatgttgagatttaatgtccagaatctcatttgttcacctttgaaaattaagaaaccctggcacagtgttgactggagccacttaccttaatagaaaataaagctcacatatatccataatgaaaagcagagaccagcacaaccatagtcacctgacagttttaaaatccaaggccaggatcttctcaactcaggcccactcacttactccacaacatacttcttctttcctcagcatctactacttgtgctgggaccttggtcttcccattgttcatgtcattcttttcctcacagttcccattcttttctccctgaaataaagaaatttcaaaatataccatgtttcatgaaaaagacaaaaacataaaattaccttcaggaagatgtattttgatataagttttctttatccataagaaattaatagatttgcaataagcattgatattctgggaaatgaaacacccttgttttgcccacctaacaactttttatttccaaaacccaagacccatcctcaacaatttactttacttaacaacatatctagggttgccagataaaatgcaggtttcccagctacatttgaatttcagctaagcaataaataatttttagtatctatcctaaatattgaccttatattttttaaaaaagtgatttatctgaaattcaaatgtaactgtacatcatgtagttttatttgataaatctgacacccctacccacatccaattcatcattaaaccctctaaatcctacttcctcaatattacccaagtcagtccatttatttctatttctagtacccttacttttgaagaagacaccacatttatatcgattgttttaatgatcttttaattggctcccaaactccagtcaaaacaacctttactctctgttaaagctaaaacaattttttcaaaacaaatctgattgtatcacaccccttccattgtttccattaatttaagatcaagtctaaactcctaaactcagctgtcattgctatatcctatctctaaacaatcactgttttgcactctgcatacactccagccattttgaaaaatctttcaggctcctggaaaagcttaactccgccctttgtttccaatatttacatataaatttttttctatctaaagcatgctttcagccaataacataaatctcactacccctttctgctgaacctaaatctttttgccctcagatagaaagataattttcccttctcctgctctgctctgattcagctctccataacaaggttgtaatcacctcctattcacccttctggtgaaggaaggatttccaccctcaggtgatggggatggttgaacatccaacacctgaaacaggacagacgatattgacagtacttgttagttgcatataatcacagaccagtggaaacagatgaaccacacagggccacagcggggtttcactggggaacagagtgaacaatcaggaggtgtgggaggcaggtttagtagtttaaagaggttgaggtgtccccctggatcccatgggaggatcacattggctcatttgaattatcatacggactggcagggaactgaaatcttctactcagggataagcagaaactgtccctggtttccttgataaaaagggttgtttgataggggaccttatccatgggaggaaagtgaggagggaaatttgtggctaagccattcaaggccctcccagttttactagatgtcaaggcagcacacgtaatattgggacttaattttagccacataactaataaatttgtaagtatgtgcaacggctcacacttgcttccagaatggcacctaaaaaacagatttacctctccccaaattcagatatggaattaaatgtaatgtcaggaaaattgtctaagagttggaaatgggaaaaaaatgttcttttggtggagttatggactccagaggttatcagattctattgaataacgtacttttgattgtatttgtaacaattaggctatttgtgaactcggtaggggtagaaatcgagttgtagaaaatggatggtaatgcaagtgatttttgaccatatcaatgcaaatgaattctgttggtagaaatattcatttccacactgtagatgaccctaaacatatgtcattacattatattttattgccttatagactattaaccaattttgaatcatacagtagcaaatttatttcagcattcttgtgtgtatgtgtttatatatacacgtgcatatgtatttaagatatataattgtatattcttcaaattcttctttgaacaggtttgaacctcttattagtttcctcattaaggaatttaataagacctttaatgcatgtttgtattttcatgagagtcattattttacctttctggaagttatacttcagcaaccatgctttaaataaaccatgatttaaaatagctgtcttagaaaaagaaaataaaagtatacttaaatgtagatgtctattttttaatgtttttattaatttgtaaatttaaataatatatatttaagagagctaagtaaacatatcataatacaaatagaatggaataagaatgacccatgtcaaggcagtgtggcaatttttacctattcaaaattgtgcatatttgttagtctgatttaacaccaagagcattagcctggatccaattccttgctcagcaatgttgaaaaatattacccttggggcatgcaaagggccccagttttgctttcctatatattcaaagtttgactgctcactctggtgactgaactttctgtgaaaaagcttaattcccaagttctcctcatcgtgtaagcagcttacatcatgactaaaaatttcaagcatcaatttgactgacaaagcataaaagaagagaggcagtgagttttctggtgcaaacagatgtcagatcacaattctgaatctctaagagatcattaagaaatctgacagtaggcaaaaagtgagattttcttgtcaaaagtgaacaccatcaatttctgaatatagttgataggtgactcggcttctaccactttgtacacttcttacgtaactgagctggtgggaagcagtgtctgtaggcagcaggtgggcaaagatcctctaagagaagcaagccattctccccctccagcacaaatgaaagaaagaacctagaaatgtactcacttcacagtctcttggcctgttcccatcatgacggggcccagagagttgggcaaggggcagttctctacagagccctgcaaggtcacatggtttggaaaaggaatgcagcctgggagaagggctagcacgggcagggcagagctctccaacaagtggctctctggatcctgtttagcatcccaccccactccccacccatttgagcaaaacaatattccctggcttctggtgcaccatctcagccatttttaccaagttcaactagcttggctaaaatgagaaaagtttaatgcacttaaaaaaaaaaagacgacgaagaagacaaagcaacagctttagtatgcacagtgaaagtgcctgccctgttgcctgcaaaattaatgaaaagaaaatatcactgaaattcactacacactcagcctcctccatgaaactccctccaacccaatagtcgacaattatcctccccaacctggatagctaaaacacttattgtctcccctgccctttctgctgtgtgcatatcctgttcctgttgtgattcacagctttctgtataggtgtttcccttcccaactagaaagtaaagtactaaaaaatcctgggaaatcatgggttgtgcctcttatatccccagttcctagtatggccttgatcaggatccatatttaagcaaataagggtttaataatgatgaatttacccacacccccattgccaacgtgaataatggcctttgttctggtacccacgaatcttattttttttaactttggaaaaacagtaaagggtcagtatcttgtcccttaataccaaaaatgaaggcccttttgtcaagcagtttcactgtgcactggttactaccttgtctgaatctggtgagacagaacatacttattcatacacgagttatgtggagtggattcattatcagtttggtgcaaaagtatggcttttttttttttttaaacagctaggcagcaaggaacaaaagaagcctaggattcattgttagcaagtcccctgagactcaagaaaggtacccagggcagaaggagtctggactgagcgtggtacaattgcaccacagctgaggtacccagggcagaaggagtctggactgagcgtggtacaattgcaccacagctgaggtacccagggcagaaggagtctggactgagcgtggtacaattgcaccacagctgagggaaacttaaccgcagcccaccctgggttacatacctcaagggcaatgtcactcactgcactaaagctttgaaggaatatactgcttccagaggaaagaggaacaaagcctgttcttcctgagcaatttctccctaactcaagatgtgatattccctaggagagacagggaaaaggcctagatcgttccaggcagctgctttctatctcagggtattgtattcccattcccagcacattctagttagtcttgagaactacaagcaagaaagcggtaaaaactaggttggtttaaagccacctagagaattgccctgaacttttgttatccagccaaattaaaaaggaaaattgaatccaatgatcttagtaaattctggaatgcagtgtgaagcttgcaatggctgatacattttaaaaggggggaaaatgtttaaaatgccctaacacttatgactgacaatgtagatataatctttcactatgttcctaaagactagagacagtatttacaaaatgcaaactgtattagtctaatttttatgctttttcttattatattataaccagcagagtgtgatccaaattaactgaaaaggagccacaaacactgaagtggttatttcaccagttgggattagtttattgctgagggtaatggaaactggaatagcaaaggactgagctattcagttttctgtttggggaccactcagttcacacagtttaaactgaagctgacactttaaatgaatttattagtctcgctttgttccaggaccagacggtagtccagctcacactcatagacatctctggtctaaataatttaatccagaagggatatattaatatcattttttttctcagatggtaagctttccaaggccagttctttgatttgatgtcatgttgtcacttggaattgaaacttccacttaaaccacctggggggaatcaagtatgttttaccagtaacatattattctgaaaattgtgtatcatggccttcagggtgagacttttataagacagaggagtcaccctctaaagttctgcagagggtctgccagggctctcagtcttagagctaaacatttaaagtgagaaggaagccctcccagaggactaagaaaatcaaattaagagtacatagtagagaatacattaggaaagattgagaggaaatactataatcagtagctttcttcatacaaaataatttatttcattgactccaagatacacaattattgatatcttataaacagtagtagccaggctgttgtcacaatgtcattgccattgtctacatataaataaatttggtgtttttccctgatggtataaaaaatcagccagcaaaccacctaaggactacttgaggaagaaatatgaatcctggttgttatctgaaaaccttttatactagttgataatatcaagacagtacaaccatcagggttttacagaatgggtgtcattgaaagagaatttcagagacaatagaggaatattctaaagaaatgtggtactatcaatgctgttgatgacatagtgatattattggaaaaacagtatcaatgagactgagtcaaaagctatttctgaagagttgctatctgaatgtgaaagcatttttaaaatactttgaacaatttattttattttttacatagctaaagaattatgtaagatgaaaatacatttctaaatatgaaagagatattttaatgattataaaataaaaattctaggtgaaaagaaagcattactacatgattcaattggaagtgtttgttagtagtacataaaataacggagtttcttccaatagatggtgtcttaatttaatgacacacaatggctgtagattattgagcaaaatggcaagacccaagccagaaaccccttcaagaattctgtcctctctttatccaaagcatgcagaccctgtgaaaagtcctccctgccctctggtcaccactgaatgagaaagtctgaggtcattaaggggatcacagaagaacatagaccttgaaatagggctacgtcatcaaaatgaacatctgaataaaatcatttcctgaacacgtcgtttcaggttttgcataaatcatggtgctcaagagtgtctcatcattttaattctattaaatgatttcagagaacatgtctatctttgtaccataattggaagtcttgttaagacaggtgtgtttagcaccacagccatattttgcccaaattgtgcagcattgcatggttctgtgaatgatttcccattgttatcataaacaactgctattttatgctcaagaacagaaagcatagcatctacacccatacagctcagtagtcacattaacaggactttactctttcactctctgttaatataactttactatttcaggagtataaaagtttctaatcactttatttttcattctaggatcatcttgaaaggtccttcaaattttcaatagaaagaatcaaaagaaaatgtacaggagtctctgaaagctacatgccaaaatcctcagagtgcacaccagtcctaaacaaatatatcacagcccttatccagtcctaacctgtactgaaaaactcaccttaaagtagactccacagtctcaaaaatattccaattttgccctttccaatctaggatactattaaaattctctcaagggagttcttttcttaccctcgtaagaataaactcaactttgacttatcaacagttaattttggtggagctgccattcaacacaaagattattttgtaagaattatcaataaattagggtgtcaggaacttgaatttaagttgtaaagattttatttacaagagcaaatcagtaataatggaatcagtacttactagtacattgaggacagttatagttctgctcatagcttctgagtataattgaggaagataaataattaaattaattcattatctctaaagccagttgaagaagttctgtttataataatatcttagatcaaagtctttctaaaatatatctcaaaaatgtcaggaaagcaaaaccttttaatttaggagaaaagcatataagaaagtaagtggggtcacatctcattaaagtgaaaacaccactccagaaaggaaagttccccacactctcaggatgtcaaaagggcctggtggaatggtgatcagtgggcccaggggagcagggtactgtggactaagccttggacttgggcggagtaggaaagcaaattggagacaaccctatgtaaagctggggctgatagagagctgcactataacggagagggtgaaattgatgaaaaagggcacaaccgagataggaagcaaagaaaatcatctgtctctccaaaacaagagaactaagtcatctaccatgacacaaatgtctactatgtaccaaagaaaaagccaaagctgagaattttagttaaaagtggatatggatagcacccatgaatacttggcagaaacaaagacaattcctttctagataaaaatatcttctactcaagcctcacaggacttagaggtgattgccagtatatgctcacaactttcttaaaaatcagaactgccagcacttggggaggctaaggcaggtggatcacctgaggtcaggagttcaagaccagcctgtccaacatggtgaaatcccatctctactaaaaacacaaaacttagctgagcatggtggtgcatgcctgtaatcccagctactcaggaggctgaggcaggagaatcgcttgaacctgggaggtggaggttgcagtgagcctagattgtgccattgcactccagcctgggtgacagagcaagactctgtctaaataaataaataaataaataaataaataaataaatatcagaagtaatccaataaatgtatcaccttcagtgaaaatcagctgaaacaccaaaccagacccataaaggctccaggtattggaattatcagataaagaacatagagtacctatgttaacatgtgtaaggaaatcagagaaagatcaaaacaaaactacaaaaaatgacaaggcagactttttaaaataaagaatttctagaaataaaattataaaactaaaatttcaaactcagtggaaatataaagcagcagattacacaaagttagaaattagtgagttggatgacatatctgaaaaagagtgtatggacaatatgagagaaaggttaacagacatggaggaaagagtaagaaagcccaatatttgtctattctgagctctagaagtaaattatagggagaatagggaaggggaaacattaaaaaagataacggctaaaaattttaccagattattgaaagacataaatcctcagataaagaagtccaataaatcttgaataaaacaaattataatataaccatattgaaaggaaggaagaaatcataaggcacagatagtttaatcctccaccacaataatatccagtaagtagatattccctaagattcatgaattataagatggcaggatgcacatattatttataacactagtgatacacaaatgctaggagaaagatagatttaaatgttgcccctgggaaagatctgggagcaagaaagtggtgggatagagaaatggtgcatttgcaataagcatctttgcgatgtttgaatttctaaaccaggattatgcattaaaaattaacttaaaaaaacttaaattagtggagctaaacattatgcatatgtttgtgaataaaaaggctaaaattttctatcacagttttcaaagaaaaagtcttataccaccataaaaagattgaagaggaatccatatctgtcttttcaggctgctaccacaatatcttaaactggtgttaaaataaagcaaaatgagaacagcaaaataacttaggttatttcttgcaaatacctctgataatcataaataaagcttcagctgtcttccaaagatagtataagatgattgcttgctaccaatcctctgccatctcaaaacccccatggtaacaacgaatcactgcaaatgctaaacaactacctcatttgcattttataagccatcctataacgccatgcctctgagtttcctcttatcactttcatctaaggattcctggtttgcaaactgttcttttgtatccacaataaacttttaaaactttcaattgtatctgattttatttttgacactgagtagagtataaataacagaaatttcttgtttacagttcttaacactggacagtccaagacacagactctggtagagtccatgcctggtgagagcccactttctggttcataacattgtgtcttctcacaggggggtaatgaatgaactcccttgggcctcttttataagggcattaaccccacccatgagggctctgcccttatgacctaatcacctcccaaaaggttctactttctaataccttgggattaggatttcaacgtatgaaacgtgagagggtgcaaacattcagaccatagcagcatctgtatattttgtgtaaaaataaaatatttatgattacaaaaaactaaattcaagaaaacccagtaagagacagtttagccataaaagataaattagcaatctaaaaattgcaagctatcctattttatagtaacacatgggaaatggagtaggcatatcagacaaggaaataaacaaaaaaaaaaaaaacacttcaaacccaggctctatgatcccacaatgcttgctctaaactactcatgccaatttttaccaagcttgatgtttcccttggaagattcagtcacctaacctgggttgtgggttgtattaaattgattttttattatcttactctaatccttataatagttgtgatatatttatatggtaaattataaatataatagattaattggttggtttttaaacaaatagattagttcattgatctactcactcctggtgatacagaaagtatgtgaaattactgtgacaaatttctaagacactcagtagtaggcaacctaaaaaactaatttactacatgggtaagccaccttttccttctggcataggttatttgttcttcctttccacaagtttccaattgtggttactaatgggtgtgttcagccccatttcttaataatttactgttatcccgctaaatgacattttcaactatctacaaatgccagtggagttggatttttttaatttaaaaaattgatctacagtctgtcatctcttcacttactatataatgaagattccagaaattcaaaatgcaaactgaatgttcagaaactcttctaagcccaaatagataaataaatgatcaagttttattgaccatcatagtcccctagaggtgactcatttgtttgcagagattaaaatagcatactttggtattctccacatgcagatatatgcagagagcattttggtcaaaagacaaggaaaagtatgatgttgcaagacaacttgtatgccaaccccagctgcagttggcagaaagatcaggactattaaatgcaggggtgttctctcttcttccccagtgagcgtctgaaactaatataagctcttgaatagctaaacattcatagatttcaaaagacaacttcttagatcttttaaaggtagacataaattatgtggcaaataaaattcacacattgtaaaaagagactctccacattcttgaagtaatatttaggcaaagtgaaaaaaaagtgttgtaagaaagctgatttggggcaccaaaaaggcctatcaagcttcttgctctacccattacttcatttagtggaaactgtcaccctcacactacaggctctgccccaggagcaactttaggcagttccttacatattgatggtttattccataacagctacacatcttttctgtgacccaacccacctgattgatccaggacagctaagggctgaaaatttcaaagtttgtcatcccactcagtcggtgaccaggatttaacagaagtcctgcccaatcagagatgacgataagcaatttacccgatcagattgttggggtggagaattcaaaccagaaacaaaagaagaaagtcagtcgattgatgaaaggtacaaaagttgaaaaacatacaaagaaagagcaacatagatgtaataatgcaatagaagccatgggtgagacagaagaaaagagctaaaaggatccgggtgcggtggctcatgcctataatcccagcactttgggaggccgaggaggtcggatcacgaggtcggatcacaaggtcaggagatcgagaccatcctggctaacacgctgaaaccctgtctctactaaaaatacaaaaaattagccgggcgttgtggtgggcacctgtagtcccagctactcaggaggctaaggcaggagaatggcatgaacccaggaggcagagcttgcagtgagcagatatcacgccactgcactccagcctgggcaacagagagagacactgtctcaaaaaaaaaaaaaaaagagttattgagccatacaaaatcatctcaaattactatccctaagtgaaaaaacaccagtctgaaaagattacatactatataatttcatttatgtaaacttataaaaaaggcaaaacattatagttgataaacagatcagtggttatcaggctgttgaggagagaggagggtttaattggcaaagtacaggcaattttttagggaagtgaaactattttgtattattctgtattgaggtatacatgacaatatgtatttatcaaaactcatagaactgtatagcacagaatggatttcaacatatgcagttttttaaaaaaaccatctaggagatcaagggattccaagatgttacaaaatcatataactatattataaatatataaaacaacctcgctgagggggttgggggagaaaggtattacacaaagtaactttggaaatgagtggagactgtaagacaggcaaaggaacttcacatgggcaatgtactctattgataaactcgtttgctatgggcataggggttaacaattctgaaagcattatgcatgtaggctgaaattaaataattaagtaaaggacagtggacagtgggagccaagtttctcagttttggcccaggaggttacagacaaacaaaagaggaaaactagaatgatccatgtggtatactagatttgagttggaaaaatcaatatgaacccatgctttgctttgatataaaaatggatacatatagaaatatttttagatatgtatgtataggttgatcattactaattcaaaaattcaaaatccagaatgttccaaaatctaaaaattttggagaacatgatgtcacaagtgaaaaaatttcacacctgacctcatgagatggattgcagtcaaaactcaggtgcataacacacagttttcttttattcagcatcctcaaaggaagaagactctcccagcttccttcagctgcgatatatctttcccacacatttccagatttccccatgcaaacacgcccacaaaaggtaataaaatggcatgtatggaggctggacgtgccaataacaggttccccatgatgccccacatggagctaagactaatctgtgttactctctgtttttggctttttgttttttgcttattctttgctctttggcataaagatattgttgaaatgtcaacaaagcctgcagattcaactatgggtaagattgataagaaaaagaggaagcatttatgtttatctgtagcacacaaagtcaagctgttgaagaaactggacaccagtgtaagcgtgaaacatcttacagaagaacatggtgttggaatgaccaccatacacaaactgaagaaacagaaagatgaaccattgaagttctatgctgatagtaatgaacacaaattaatgaaaaataaaaaaaaactgaataaagctaaaaattaatatcttgatcatgtgttgaaagagtgatccatcaacactgcagtgaacacatgccacttaatggtatactgatcatgaaacaagcaaagttctatcatggtgaactgaaatttggaaggaattaaaaatacatgcaacaagctggctgcagaaatttaagaaaagacacagcattaaattgttaaagatttgtggtgataaagcatctgccaattatgaagcagcagggaaatttattaactgatgagtttgccaaagtcatcactgatgaaaatctggcaccagaacaagtgctgataaaacatcaatgcttgggcgttattggtccaaaaagacacttgctacagctgacgagacagcccctccaggaattaaggatgccaaggacagaataactgtgctgggatgtgctaatgcagcaggcatgcataagtgtaaactctgcttagacaaaagcttgcatcctctctgttttcaaggagtgaatttcttaccggtctattattatgctaataaggagtcatggatcaccaatgacatcttttctgattagcttcacaaacattttgttacagcacctcctgctgattgcagggaagctggatggataatgactaaatggcaagaatgtgttattccttcacaactatttggctgatcctccagctgaaattcccataaaaaataatgtctataccatgtactttttcccaaatatgacttcattaattcagccaatgtgaccagatcacattacataaaaaagattacatataaaaacactttcttgagcagcaggctaacagcagtgaacagacacttgggtatggaaggttttcaagagaaagttagcatgaaaaatgccatatatatgctgttgccaatccttggaacacagtgactacagacacagttgttgcatgcctggcacaacttctggcctgtgagtatgttcagtgataatgatgaacaaggtggtgactttgaagaattttgcacgtcaagtgagaaaaaaaaatgatgcatgacgtccttacatatgcaaataatatattttcagagtccatcagtaagttgaacaagctgcgtatctaataagattttattaactcttattttaagttcggggtacatgtgcagattgtttatacaggtaaactcacatcatgggagtttgttgtacagattttttcatcacccaggtactaagcctagtacccaataattattttttctgatcctctcccttttcccaccctccaccctctggtaggctccagtgtctgttgttcccctatatttgcccatgagttctcatcatctagctcctacttataaatgaggacatggtgtatttggttttctgttcctgagttcgttttctaaggctaatgacctccagctccatccatgttcctgcaaaggtaattgtctcgttcttgtttacagctgcataatgttgcatggtgtgtatgtatcacattttctttatccagtctactattgatgggtttttaggttgattctatgtctttgctattgtgaatagtgctgcaaggaacatacgcatgcatgtaattttatgatagaacaattatattcttgtgggtatatacccagtaataggatcgctgggttgaacggtagttctgtttttaggtctttgaagaatcgccacactgttttccacaaaggctgaactaatttacactcccaccaacagtgtataaatgttcctttttctccacaacctcaccagcacctgttattttttgactttttagtaatagctattcttactggtgtgacatgttattgcattgtaattttgatttgcatttctctcatgatcagcgatgttgaggttttacacatcaatagtgaggcagtagttgtgcagtcattgaccaatggagccaaaaaggttctgaatcaagatgatcttgatgagagtgatgataaagatgatgtcattaacacggcagaaaaactgcctgtagacaatacgtgaaaatgtgtgatgggcttattgaaggactaaaacagcatgtatttataacagaacaagaaatcatgtcagtttataaaattaaagagaggcttctaagacaaaaatcattcttaaggaggcagacgactctggaggaaacatttttaaaagccatccagcagaatgcctcttatccctaggggactcatttcctggtctttcaaatgcttctgatgtttcttctcacataaaaatataaaatacagcatacaataagcttttaatcaaaacacggcatcagaggaggagactgaaagcttactgttgttgctgctgttgttgctgttgtttaacagctgatccagctattcttgggtttgattttactgcacaaaggacatgtcgtattttttattgttaagtacttacatgaataagtgtaagaaaatgattattgatcagtagcatttaaattcagagtcaggaattatggtgatgccaaacaaccacagattatccacaaaggtggacatagtggcacctttgctttctgatgattccatgtaaacaaactttgtttcatgtaaaaaaattattaaaaatattatattagccaggtgtagtggcacatgcttataatcccagctacttaggaggctgagacaggagaattgcttgaacccgggaggtggaggttgcagtgagccaagatttgtgccattgcactccagcctaggtgacagagcaagactttgtctcaaaaaaaatacatacattatattaaattactttcaggctatttgtataaggtgcatataaacataaataaattttaggtttagacttggatctcatctccaaggtatctcattatgtgcatgcaaatattctaaaaccaaaaaatctgaaatctcaaacatttctggtcccaagcacttcagataagatactcaacctgtatacgtggattagtatgtacacctatattttcttgctctgatagttgaaagaagtaacaacatcacatgagcaatgagtagacccagatcccaggtcttggtttctaatactgttcttcaatacaaacaaacatcactcttcagagaaatggctgattccagggctagggtcaaaatatacaagatgatcctggagcactttgtagtgccactaagtaaggaagtactcaaaaaaattcatgataatgaatgtatgtcaaagaaacacaggagctaagcgaaaaagctcccaatggccaaagctggaacagtttgtgcaaaataaaaaacagtagtattgggttataacccaagtataaaataaatattcatgagtccatttagatgtaaataaatggctacataagtaaataaatgaagagaatagacaaatctctcttgcagaagaattccaaatattttatgtactctaccctcatcgaggtagagcatcattcatagtgacttccttccaaaaaagacagtttggaaaagagctggggtagagcaactttcaacagcaaaatttgacaaacactacttcagctacctgatcaaggttaacatcaacagcgataagtgacattgatagcatttaccctgacatgatgtgatgagaatggcattttacctctgtgatcttgctctcaaatacccaaaacctctgtttaattgtgagaaaaacataatataaacccaaattgagggacattttacaaaatatctgatcagtactcaaaactgtcaaggtaataaaaagtaagaaaactctaagaaactatcctagccaagagaagactgagcagacatgaggacaaaacttaacgtgatatcatgtatgaaattcagagatagagaaaggataacagggaaagactaacggaatcaaaataaaatgtggaatttaattaataataatgtactcatattagttcattaattgtgacaaatgtaccaaactaatgtaggagattaacaataagggaaactgagtgcatgttatatggaaattatgtgtactatcttcacaatgtttctgtacacttaaactatttaaaataaaaaattaatttttataaaagcagtctgactgcagggtgcatgctcttaaacctaggcaatactgccttttttatatatgaaattcctatttgactagctattatctacttccccaacagtagggggtagttgtaactttcattataatttcaaaactaattttctcccaaagatgattaattttaagtgataataaacatcaaatttttaaatctaaatctctttttcctttgtagacagcacttagttgtttttgtgtcattgaatactaaacctaaactctcaatttgtgctagaatgaagtttgttgtcctgtatagcaaagagccattcagcatttaccagggctattaaaccatattgctgcatcgttcacaatagttgaaattgttagatcactttcctactgtttgattccaggctttaacaagtatttattggcaccgaagcagaatatgaagttggaatgatcaattatttccattatattatacacaatatatttttaaaagctatagcagttattattttttcaattttaaatttttgtgggtacagtaggtgtatatatttataagatacatgagatgttttgatacaggcatgcaatgcataataatcgcatcatggaagatggggtatctgtatcctccaacgtttatcctttgtgttacaaacaattcaattatattcttctagttattttaaaatgtacaactacattattattgactatagtcaccctgttgtgctatcaaatactagggcttattcattcgttctagttttgtacccattaaccgcccccacatccccctagccacctccccctaccacaacccttcccagcctctgataactatccttccactctctatcttcatgggttcaattgtgtgatttttaggtcccacaaataaatgagaacatgtgatggttgtctttctgtgcctggcttatttagcttaacataatgacctccagtttcatccatgttgttgcaaatgactgaatctcattttttatagctaaatagtactccattgtgaataaatactacatttttttaaccattcatctgttgatgaacacaggttgcttccaaattttggctatcgtaaacagagctgcaagaaatatgggagtgcacatatctcttcgatatgttgatttcctttcttttgggcatatacccagcagtgggattgctacattgtatggcaactctatttttagttttttgagaaacctccaaacagttcttattttattttactttatttatttatttatttatttatttttgagacagagtttcgctctgtcacccaggctggagtgcagtggcgcgatcttggctcactgcaagctctgcctcgcaggttcatgccattctcctgcctcagcctcccaagtagctgggactacaggcacctgccaccaggcccagctaattttttgtatttttagtagagacggggtttcaccatgttagccaaggtggtctcgatctcctgacctcatgatctgcccgccttggcctcccaatattttattttttttgagatagagtctcactctgttgcccaggctggagtgcagtggtgcgatctcagctcactgcaagctctgcctcagcctcccgagtagctgggactacaggcgcccgccaccacacctggctaatttttttgtatttttagtagagacagggtttcatggtgttagccaggatggtctcaatctcctgaccttgtgatccaccccacctcagcctcccaaagtgctgggattacaggtgtaagccaccgcgcccaacccaaacagttcttattattatatttttttcaaaatcttcttagcctaaattaggcaaatctttctcataaattttctgatcttctcagtattacaacaaataacacatacactaaatccctacattttgttctaaattataagtgatgtaataaatctctccctgaatctgactatgatatgtattgttacatatgaataattctataatccaggatatacagtgaaagagctcccagtaattaccaagtcagagaaggtttaattcagaatattcacattatcataatttgctgcaactcaagcaaatcttgatttatttttcttttgagaaaactacaaatggaattaccaatggaattttgtgttttgcttaatctagtaaccatagctagagtctgtaaaagataatttaaattcagtcttggcagatggaagatacgctaattttaattcaagatatttcaagaaatcattatatattactgggaattttaaaagaagtgtctcgatggacagtgtgctccataccgaaaatgggaaaatactcctggaagttaataggtcccatagctttcagtaataatacataattagaattaagtgccacaaatatacacattattttttaaagatacataatttagaaagaattttcttagctttttttaattcagatcccagccctctattaaactagcctattttgattcctactctttcagtcactttgggaaatcaatgaccagagcattctgctctgatgaaagaaacagacatgctaaatatattaattacttcaacacaataagatatgataggcaaaagggaacaagaatgtaaatgaaaaagtctggcaaaagcaccacagaaaatttaatatttgagctaagtcttgaaggataaatagcacatcaacaggtgaaaaataaaaagaatgacattttagacacagggaattgcctgaacaagccagcccatagcttactcttggaactgtcaggcatctgttaaggagagaggtgggtgagaacaagaaaagagacaacactggaaggtgagtgagcaccattgtagaaagtcttataaatcatgctaaatactttctactgtattcagtagacaaggagtaattaatagaatttttaagtgattcagggaagtgatcaaattctttttctggtagttttgagggaagacttgagaaacagcagacactggacccagttaggtttctgtcatgatgctatatggaatacatcattaactaggcagtaccagtttggaaatggagaagaaaatcctgatgagaaagacatttgagacaaggaatcaaaaggacatttgccagtcatgcaccaaggacacttatcagaaagaagagaagtacttttaggatgagagacctgataaggattttaggctgatgggaaacagtcataagagatgaattttagaagtttctaagagaagggagatgggatgaggtttttttaaaggtgaaattgcaaatcctatgtagaaataagtatagatatttcctagagacaagaaggaagtatgagttcagataaagataatttgatgttaaggatggaagaaacttgaacagaaatcgtcatttttgccattgggataggagcaacaaaagaagcatgaacttaaacagagaagtgaaagctgaaaagttacactgaggaagggaaaagaaagaagacttggaactgaggagcctaaaaaagatcaggatcatgtatgagatgaatgctaactcacaggtgtgcacaaaagtgttcactcaacaggcctgggttgctcaaactgaacacttccaagaaaatcctgtcttcaggattggccctggaagacgagctctgagcctttgaaagtttctgcctgataagagtcctttgtatgcctgaggccttgggccatgcagcactagtttgatcataacgtttatggtgacaatatgatctaccgtgaatgatttttctaaggttgcatatgaatgacatgttttgctttgaggtgctggagtaggagcagctgaggtcagtcagacagtcattgcatgtctttgtgataaatctccaaaaataaccctcgataccatgattcaaatgagcttatctggttggcaacacatcacatatgttgccacacatccttggaagaattaagcacaaccatgcaactcccctgtgaaggacacctgcaagctgatgcctggtttctccaggattttgcctcatgcaccttttctcttagcttattttaatgtgtatccttttactgtaagaaaccacagccatgagttagtgagttttctgaatcctgcaagtccgcaagtccttctagtaaattattgagcctgagggtgatcctagggattcctgggaattctatagaattacccattccccaactccaagtcaaaaacagtgagtagaggttgactgaaagtttttctcaatcgcaggacagtaagtgaaaagagttgcagacactgaagacagagttacagaaaaaaatgccacagaatccagcctgagtaagcattaacatgaagtcaagatggaacagctggatgaaagaagagtagtccctgtagttactgataaggtcagaaagaagaatagtggcagtaaaggattgaaggtagtgaggacatgatgttggagtacagcacttcagaaatgatgggtaaagttgcaaagaatcctaaagtttagtctgcactatggagctagtaaactgattgacagtgaaggtaaaagcaaatatagttgagaggattcagaagctatgatgctaatgtggtccagggtaatgcacatgcaagcaaatagaggaaaacagtgaaataaatgaatatcaacgttcttgatggtgaagtagtgttgtattagtccgttttcatgctgctgataaagacatccttgagactgtgtaatttattaagaaaaagaagtttaatggattcacagttccatatggctggggaggcctcacaatcatggcgaaggcaaaaggcatgtcttacatggaggcagacaagagagagaatgagaaccaagtgaaagggatttcctctcataaaaccatcagatcttgtgagacttaatcactaccatgagaatagtatggggaaaatcacctccatgattcaattatctcccaccaggtccctcccacaactcatgggaataatgggagctacaactcaaaatgacatttgggtggggactcagagccaaaccatttcattctgcccatagcccctcccaaatctcaagtccttacatttcaaaaccaatcatgtcttcccaacagtccaccaaagtcttaactaatttcagcattaactcaaaagtccacagcccaaagtctgatgtgagacaaggcacaccccttccacctatgagccggtaaaattaaaagcaagttagttacttcctagatacaatgggggtacaggcattggataaatacacccattccaaatgaaagaaattggccaaaacaaaggggctacagagacagtgaaatccaaaatctagcaaagcagtcaaatgttaaagctccaaaagtatctcctttgactccgtgtctcacatctaggtcatgctgatacaagaggtgggttcccatgatcttgggcagctccaccactgtggctttgcagtgtacagcttctccccagctgctttcacagactgacattgagtgtctgtgacttttccaggtgcacagtgcaagctgcaggtggatctaccattctgggatctggaggacaatggccctcttttcacagcttcattaggccccagtggggactctgtgtgggggctttaaccacacatttccctttggcactgccatagcagagattcttcatgagggctccgcccctgcagcaaacttctgcatggacatccaactgcttctatacatcctctgaaatctaggcagaggttcccaaacctcaattcttgacttctgtgcacctgcaggctcaacaccacgtggaagttgccaaggcttggggcttgcaccctctaaagtcacagcctgagctgtaccttggccccttttggccatggctagagtggctgggacacagggcacaaagtccctaggctgcacacagcaggggcaccctgggcccggcccatgaaacctttttttcttccaagcccctgggcctgtgatgataagggctgtctcaaaagtctctgacatgccctggagacatttctcccactgtcctggtgattaacatttggcttcttgtaacttatgcaaatgtctgcaactagattgaatttctcctcagaaaatgggtttttcttttctatctcattgtcaggctgcaaattttctgaacttttatgctctgcttctcttttaaaactgaatacttttaacagcacccaagtcacctcttggatgttttgctgcttagaaatttcttccgccagataccctaaatcatttctctcaagtttaaagttccacaaaactctagggcaggggcaaaatgccaccagtctctttgctaaaacatagcaagagtcacctttattccagtttccaataagttccaaaactgtactcctccataataacaaatctcagttaatggttacttcattcttctggctgcttaagccaaaaaccttggagttatcctttactcaggtttttctcaaaccaaatattcaatcttctaacatattatgtcaactctggttcaaaataccttcagctgcaaccattgctcactacttccaagccaccggtatcgtgtgcctggttcttttcctcatcctcatgctccatcccagcatattctactcagcagcaagagggatcctggtaaaacaccatcaggtcatgtcatttatctcccagcactaccatctcactgggcgcaaacctccaaatctgccagtggctttcaatgacctgcatttactaagccagtagcatcctcactgcacttcccctcaccccctgttccccagccttactggcctctttggtgctccctggctttctacacctactgatctctcttcttggaacattagtctcccagataagcatgtttctctccttcagcttcttagagtttttgctcaaatgtaatcctccagtcgagactttctctactaacactttttactatttacaatcgcactacacccacttcaccgcctggcaattcctatctcctcccttggttttagtttttttctccctagcattagtcaccttctgacatctctctctctctctctctctctctctctctctctctctctttctgtaatttattcatttaggattgctctttctttctagtatgtaagccccaaggagcaaggagattttccattcactactgtttttctagttccaagaactgaagctagcagactattaagtactcaacacagactgtatttgttgaatgaatgagtgaatgaatgaatggatgtctgaaaagcaatggaaagtgttacataacatcattttgtaatcagcagactcaccattaaacccagcccttggacacatcctgttataaccttgtctggaagcagcaagtgtgaggactgagaaacagctgcccaatagagcactgtcctcctagtgaattatgcaatgcttcaaccatttaattcattgtacattgtcatcagataatggcttgtacaagcctaatttcctcagggggaagaatttcggcttcctaaacaagaaaaacctttaattatctattcatttaactatgaaggagaaaaggactatttctgcattttttttcttcttggaaaactgggcttcgttggttgtctttgataacttaaatatatggactgtgttttttaaattactttattgtattcatttttacatgtatttatggagcacctacaatgtgcttatttatttatttagtcataaaaatggttattaaatatctgatatgtgccaagggatgtgctactcagtaaaactgacatacttattttactgggtttcaatgttcattacaataaaaaatatatttaataaataaataaataactgggactttagaattgttgtattctacattttgtgcatattaatcctggaagtgaacaatggttcaccacatgccattcaaagactatgcctccagaaatccactaggacatctctgatgctcccatgctgtcttcactatgaatgcacaattgtaactgcagcctgaaaagtgcatagaaatcacaagctatatagccttcaggaaacaaggtctaggtcacagtatgaagatctgtgtcacattagaaggcaagactcctgagccaatagagggtaaaaggaatcttgcatgtgcagtggaaatgatagataacagttttagcattgggaccaaccttgggggcaggaatgattagagcttatctcactaaccctccagccaccatattgaggtagccacagctggagggaatgaacttcatgcagtgcatctgagcaatcaacaagaggagtagcctgctaaagacacccagtgcttctcctagacctccttgtatcccttttgccatttctgtactttgctgcctattttcttccaatggccagcacctgacactcgtcttaggacaactgccctcaggggtccctgaagaccacttgcctgcagccatcatggaaatccacgatggtgaattctcatctcaaggaggaaagcccagctccttggcctccagtggggacacactgaggcttaacccacacaccagagtacccttgcagaatcaggctgacactatcctcaacaactcattagcttcatccccatccctgccctgcttcttcagccttcttataaatttctcttgggaaaatttccctaataaatcatttgccactaatactaatctcaaagatcacttctggagaacccaatctaggtcaccctcttagtctcattttcaggcattgcccatagagccccccttttcttattctatggtgacattgtgaattcataggcaatcccttagtgacatttagcaagtgacaatattgctttccaggaggcagcccatagagtttaactcttccacaatattattttactgaggatatatatagatagatagatacaaactcactctacagagagtttaactcttccacagtattattttactgaggatatatatgtgtgtgtgtgtgtgtgtgtgtgtgtgtgtgtgtgtgtgtgtgttttaggttgcaaggggaaagtaacataaaacctttgaatgctctagaatactgtttttgcatttccttcttaattcttatatgactacaaccccaagaaggttttcttttcctgggttgttttctgaaggagctcatcctgctacaacatcactcccacaatgtgtttagtttcggcagctcagttggagtctgccttgcaataaatgaactttcactctcagctcatatatggggtgacagcagtgttgtcttcaattgtctttatgacagggctctggttcctacctggttgattccagagtgcatgtctacccagaagttggtggcgagccatgcaggtggcctgcctgaactcttgaatgcagcaagctctgcgtactcatctggtccaggcaggccaactgctatagggagaggtgaacacagtccttagaattaaaggattctgtggctggaagatcttgcaagtcatcctggttcaatctctactttctgatgagaaaattgaggctcctcattgtcacacaatgttttggtgcaagatctgagatcagaatcggtgtttagaccctcagtctaccctgcttcatatagaactggattttgtctttttcctttaaaagagggcctttaaggtggggaacgtcacacaccagggcctctcagggagtgaggggctgggggagggatagcattaggagaaatacctaatgtaaatgacgagttgataggtgcagcaaaccaacatggcacatgtatacctatgtatcaaacctgcacattgtgcacatgtaccctagaacttaaaagtataataaaaaaagaaaagaggacccttcaaatttctgcctgtcacaggagtagtttgtaccattccctatatgagaaagacagatgggaactttccaggtgagtaacaagtttgatttttcattcagcaaatgtctagagtgggtgaagatagaaatgtctattttattccacattgaccagtaaatgacctgctgtacaaactgctcagcaattctcctcattttgcagatgagaaaatagaagttctataagttgtaatgacttaacctgagaccatatgataaagaatattttcagggtgcaaacctcagtgtctctattgtcaaagcttgcactccacataccactcttgcctctccaaagcctcacaccatttgctttttagcttggcacagatcttactaaaatgtctttgcccactttcctgctttggtaatacagtggagtggtcagagttgaagtcttctttgatgcattgggaccatgttgtgccacagacaattgttcttgggcatgaatttttcttgtacaggtccgtgcatgtaactaccttaaggagacaggattgtcctaaatctgcactgaccacgtccttgaatattgttttcctcctgattttaggcatgtatcatgtaggattgatccacatgtggatgcacttatgtcaacaaaaagcatgcataatttcaaacattcaggccttggtctgctcttgctcatagcacctccacacagccaaggcagaattcccatttgggaaccagaagctttgcaaaggaactccattggcatgtattagaatgctggttgttttgacagacccaagacttcactgagctcaactgcacacagatattaatgctgagtctcaaatatattgaaagcggaagaagaacagattgttcctctgtgtagtggtttcgttctgaagaactctctttgaagtcaaggaaatggatgcctgcaacagatagagagtgcagtggagaatggcactcatgtgtcactcttaaatactttcaacttggctatttttaagtcaaatgtcttcaaatatgtcaaaagcacttgttctaaattaagaataaaggccatggcaagttgtgactttttttttaactaagtcagtttttcagctctttaaacatgactgaatccatatggaaacttttgttcaatatgaaaaccatatttttccatattcctgaatggccagtccaaatttcctcatgcttaaatattttaacatatatacagatacgtaaacacattgaatgtaaatatgtatatgtgtatctgtgtgagttaatccatgtatcgtgtgtttatgtgtgtatatgtgtatatcaagtatagaaagtgttcattttaaggccagttttgattgaaaaatttaatatactttattagtaagtgccataactaggatgtttctatttcaatgtcaaaatacagcaacaataaaattataacaattatgttccattgaaggtatccatgatatttggacaaaaaaattgcttgcttgacctgttagtgactttctcagtacagtaaattatttttggccaatatgttaaagtaaaattttcataacaacacacacacacacatacactcacacaacctgttgcaggataataaaaagagaaactgcagacctgagaaagtagtgttggcagtaccagttggaatatccaaaaattcacaaatcaaagacaaattttgagttgtaacagtatagagagatagtactgtaacatggcgggcaatccaagccccaagcattcaaaattcattttgggcaggatttctaaaaatgggaaacaaaacaaaacaaaacaaaaacgccagggagccttaaaaggtagttctctaagttaccaaaatcgtattgttctccggaatatatcattacaactaaaacagtgttgtacatgcagacccatccaaattatgtttgcccatgagctccataaagaagccaaatatgtgtgactctgttgccctgcaacaggcatctcctgactcctctggctggtcatctcactcccattattactcttcagtagaaaataactttggggtaacaaggaaggcaggataaaatacacaaataaacttggtagaagcattaaaaaaaatgggaaaaaactgtgttgaggtaaaagacaaagctgatgatgtcctaaatggaggcatttttattaactcatggtctgtattcagtaacagtttcatttatttattcattcatttatttcaagctatgcattgagcaacgtctcaatgtgccaagcaatatgcacagtggttacagtgataaataagacagaaaaggcttctgcctcaataaagtttacagtttaatggcaaaggcaggcaaagatgaaagaagtaaaattgttataattatgttccattaaaagtatctatgatatttggacaaagaaattgctatcttaacctattagtgattttctcagtgaaataaattatttttggccaacttgctaaagtgaaatttttactggggaaagtatgacatatttattgaacagcaagaaattctgaccagaattcagtgaccaaagaaacacatatcaatgagtaggataaggagagattatggaggcttgcaagaggtattcaaattggattacgggtggaggcttagtcaatttttaatatgaatgatatggtaaaaacattgtttgagggccgggtgcagtggttcatgcctgtaatcctagaacttttggaggccaaagcgggtggattgcctcagctcaggagttcgtgaccagcctgggcaacatggtgcaaccccgtctctactaaaatacaaaaaattagccaggcatggtggcatgcacctgtagtcccagctacttgggaggctgaggcaagagacttgcgtgaacctgagagtcagaggttgcagtgagccaagatcgtgccactgcactccagcctgggcaatacagcgagactccatctcaaaaaaaaaattattaaataatacatacatcaataaataaataaataaaatgttgttgaggaaaactggcgtcatcattgcaggcagagaagagatcaactaggtttctgacatccaagattaggttatgttcacccaatccatgcaaatatatgactctactccttcactctagccaacaggtttaatcttacttttttcttctttgtctgcctttgagattaaactgtaaacttcacggaggcagaagctcattctgtcttatttattaccataaccactatgcatattacctggcacattgagaagttgctcaatacatagcttgaaataaatgaacgaataagtgaatgaagctattacacaatatagacgatgagataataaaggtttaaattaagattatggatacgaaaagagaggaagaaatattgcaaacattgaaaattagattagcatgattttatatagaagatgcaagaggggctgatacaaagatattaacagtttgcatctgtacagaccttgataatttacatagtattttcacaaatgacttaacaattttgaacaactttgccccatgttttccatccgaaacaaacaaaattatgttgacgatattgaggaaatccaagacttgagctgcaggaccatttggagggatatgttaagttcagttgtagtcacactgaatttgaaaataaggcagaatgttgaaatgaaaatatctagtattaaattgaaaatatggaacactgacatgaaagaacagttctggagatacaaactgattgtctttcagggctgaaaaagcaaggagacactttcaaccaaaacccaagtcagtttaataatatgttttcattctccaattttaaaattttcactttagggtatcaattgcattttttaatttgtatattcaagtaaactaaaaactcctattagcttcaaggctaatacgttttcaacttcaaaaaaaaaaaaaaaagaaatgcgataccagaaaaaatggctgataggaggtaggactaaattgcagctcccactcagatggacagagcagcatatggagacccacttcatgaacttttgctccaagaactactgaggaacataacaggaaacccaagagaatccatagaccctttgaaggaggtggatggctattgcaggctctgtgagacagctgaggaactgtgagttggcttgctttctcagctgggaggcttgtagccttgagtaagttctcagccatgctcgccggctgcctggaaataaattcaatgctattggcagggcacagtgggagtgacactggccttttgggctgtggactgcatgggagctgggtgaggcctgtggctgccagctttcccccactttaatgatgacctgggtgactcaacaggggcagccatcatcccccgggaaacataattccattggcctgagaaccacacccccatccctcacagcagccacagcaagccctgcccaaggagagtctgacctcagaaatgcctaaacctgctcccacctgaacgtcctccctacccactctggtcgtcaaagacaaaggacataatctcttgggagctctatggccccacccaccacctgttccttcctctactaccacagctgatgcactcttgaaagcaccatctcctggctggaggccaaccagcacacgtaacaaaaatacaaccaagaaccctcacagaatccacttcactcccctgctacctccatgggagcagaagctagtatccatgactaggagacctgaagatgggtcacatcacaggactctttgccaacactccccagtaccagcttggagcacagtagctcttctgggtggttagatccaaaaaagaaacaacaatcactgcagttcagttctcaggaagcccacccctaggggaaagaggagagcaccacatcaagggagcaccctgtgggaaaaagaaactgaacagcagcccttgagtcccagatcttcactctgacatagtctacccaaatgagaaggaaccagaaaaacggttctggtaacacaacaaaacaaggttatttaacatccccaaaagatcacactagctcaccagcaatggatttaaaccaagaagaaacctctgaattgccaggaaaaaaaaaaaaaaaacaacagaaggttgactattaagccaatcaaggaggcaccagagaaaggtgaagtccaacttaaagaaaaaaaaaaaaaaagatataggatatgaatggaaaaatctccagtgaaacagatagcataaataaaaaacaatcacactttctggaaatcaaggacacacttagagaaatgtaaaatgcactggaaagtctcagcaatagaatagaacaaggagaagaaagaatttcagagctcaaagacagggcttttgaattaactcaatctgacaaagacaaaaaatttttttaaagaacaaagcctccaagaagtttcagattatgctaaatgaccaaaactaagaataattggtgttcctgagggagaagagaaatctgaaggtgtggaaaacatatttgagggaatcatccaggaaaacttccccagccttactggcgatctagacatccaaatacaaaaagctcaaagaacacctgggaaattcatcacaaagagaccatcacctaggcacatggtcatcaggttgtttatagtcacgacaaaggaaagaatcttaagagctgtgaggcaaaagcatcagataacctataaagaaaaccctgtctgattaacagcagatttcacagcagaaactacaggttagaagggattggggttctatttttagcttccttaaacaaaacaattattagccaagaattttgtatccagaaaaactaaattttgtaaatgaaggacagatagtctttttcagacaaacaaatgctgagaaaatttcccactaccaagccagcactataagaactgctaaaaggagctctaaatcttcaaacgaatccttgacatacaccaaaatagaacctcccaaaagcaaaaatttcacaggacctataaaacaatacaatgaaaaaaaaataagatattcaggcaacaaataacatgataattagaatagtatgtcacatcttaatactaatgttgaatgtaaatggcctaaatgcttcatttaaaagatgcagaatggcagaatggataaggattcaccaacaaagtgtcatcaagagactcacctgacacataaggactcacacaaacttaaggtaaagatatagaaaaaaatatgccatgcaaatggacaccaaaagagagcagaagtagctattcttgtatcaggcgaaacaaactttaaagcaacagcagttaaaaaagacaaagagagacattacgtaatgataaacggactagtccaacagaaaaatatcacaattctaaatatatatgcacctaacactggagctcccaaagttataaacaattactactaggcctaagaaatgagataggcagccacacaataatagtgtgggaatttaatactccactgacagcactagacaggtcatcaagatggaagttcaaaaaagaaacaatgaatttaaactataccctacaacaaaaatggacttaacagatatttacagaacattctacccaacaactgcagaatttacattctatccatcagcatatggaacattccccaagatagaccatatgataggccacaaaacaaatctcaacaaatttaagaaaatcaaaactatagcaagtactctctcagaccaaagtggaataaaattggaaatcaactccaaaaggaactctcaaaataatgcaaatacgtggaaattaaataacttgttcctgaatgatcattgggtcaataatgaaatcaaggtagaatttaaaatattctttgaactgaatgatagtagtgacataacctatcaaaacctcttggatactgcaaccgatattacaactgataccacagaaatacaaaagatcattcaaggctactatggacatctttacatgcataaactagaaaacctagaggagatagataaatgcctagaaatatacaaccatgcaagagtaaaccaaaaataaatagactctgaacagaccaacaacaagcagcaagactgaaacagtaatttaaaattaccattttaaatgggagcagctcacacctgtaatcccaggagcagctcacacctgtaatcccagcactttgggaggctgaggcagatggatcacttgaggtcaggagttcaagaccagcctggccaacatggcaaaacctcatctctgctaaaaatacaaaaattagctgtgcatggtggtgggcacctgtagtcccagctactcagaatgctggggaaggggaatcgcttgaacccaggagggaagcagaggttgcagtgagtgaagatcgtgccactgcactccagtctgggagacagagagagacaccatctcaaaaaaaaaaaaaaaaaaaaagttaccaacaaaaaaatttcaggacagacgaattcacagctaaattctatcagacattcaattcaaagaagaattggtaccaatcttattgacactattccaaaagatagtgatagagggaatcctccctaaatcatgctatgaagccagtaacaccctaacaccaaaaccaggaaagggcataacaagaaaaggaaactacagaccaacatccctgatgaacatagatgcaaaaatcctcaaaaaaaaaaaaaaatctagctagccagatccaacagcatatcaaaaagataatccaccatgatcaaatgggtttcatagcaggaatgcaggaatagtttaacatctgcaagtcaatatatgctatataccacacaaacagaatttaaaacaaaaatcacatgatcatgtcaatagatgcaaaaaaaagcatttgacaaaatccaacatccctttatgattaaaactttcagcaagatcggcatacaagggacataccttaaggtaataaacaccatctatgacaaacccacagccaacattacactgaatgggaaaaagttgaaagcattctccctgagaactggaacaaggcaaggatgcccactttcaccacttctattcaacacagcaccagaagtcctagccagagcaatcagacaagagaaagaaataaagggcttccaaataggtgaaaaggaagtcaacctgtcactgtttgctgatgatgactgtttacctacaaacccctaaaacccctccagaaagctcccagaactaataaaagaattcagcaaagttttcatatacaaaattaaagtatacaaattagtagctcttctatatgccaacagcaaccaagctgagaatcaaattaagaactcaaccccttttacaatagctgcaaaaataaaaaataaaatacttggtaatatacttaatcaaggaagtgaaagacgtctacagggaaaactacgaaacactgatgaaagacatcatagatgacacaaacatatagaaacatatcccatgctcatagatgggtagaatcaatattgtgaaaatgaccatactgccaaaagcaatctacaaatttaatgcaattcaaatgcccatcaattaacaagtggatgaagaaatgtgatagatagatagatagatagaaagatagatagatagatagatagacagatctacagatagatagatacctaaatatatatatatattatatacaaaatgagtgcaagctatgtgactgtacataatatgtatctgtatgtatatatagcacagaaaccacagagtggcttgtatactggtggacctgaagtggtacacatgatcggggtgacttccagcaaattttgactctagaatcaagaacttctatatttgctgatacctccctccataatgtaactgtgactgtacatagcttgcactcattttagccagcagcaaaaagcttagtcaaaataaagaaacttttcaaagttcaaagagaaaaatcaattaaataaaataaaataggataccatcagaattcccacactatagatggggaaaccattgtatagagagattaaataactttttcaaattacccaccagcaaaagtatttgccttgtcttctcaggatcctcactattatggtagccttctctcctttctttctgcatattcttttttttttttttttttttttttttttgcccttaaccaaaaccaggacctatctaacaatataattaattcactaaaaagagtcaggccaagtcatttagcttaatgtgtcacatttccaagatagcatttgtattaaataaagaccttaagtgttttaaaagaaaaaaaaagaaatggagttaaacatgtaagaaatgtcctcaaatctaagttgcagtactcctacactgatgaagcttgctgactaggacttacatttccattgtaaagcatcattataaaagtgcactttcttcagggaaaaagatacccatgactttctccccacggttcaagtgcagtgctatgttttcttcactgtgggaatattttctagaagcagcaacaaaccaatgcctgtctcttgcatacatattatgaggccctattgcagcaatgcatgtcaatttgaataaagtttataattcctttccctctcttttcctcccccatctccatccaggaattgaatttacaatcatggtgcaatatacaaaactttctaaccatggtaggtaattgagtgagaaaagatgaattacatatagtttacaaaattagaactacctaagatgtctattcttttctgtgaacatatatatcctttacactagactgatattcttataatctggtgggtttttttttaagtttctatggtacggcttttaaatttttcttcaactcttcactatggagcataatgttagttaggattacttttgataattcactctactggttttcatacattaaaaaaaaaacatattgaaacctgtccatcagacattttgcaatttaacaaaactttgaaataaaaagctttccagaagttttcagagtgaaaaatatgatcaaatagtgtaagccaaagccaagatttcaacttgagacttcgccattttcttgggctctacggctattaagaaaaacatggtaggcaatttgtaaaactaaatgacattttttggaagaaaaagtccttatataaattagattacagtgacattttgctgacatatgaaccactagaatatggaatttaatagatgacatctgattcaaatcctatccaagaagtgtgttaccggaagtagcacaaacgcctccacatggcatatggcacaggctcacctagagaattcgctaacacagcagcctctaaggacagcacaaaagtggttctctttttgagtttcaaaacccttcagagcattgagtgatatttttcaatcttgtaagcattgctttttcagtgaggccttttcccactctatataaaattccataaccccttcctaatctctgaacgtttctctggaatgcatggttcagaatgcctcttcttgtctacagggacagaatttcttaactgcaaagtaggaatgtcccagcatggtgagatacaagggtgatatgggtggcttctccctttcctcatttattaataaaactgactcttatttgtctgcaaataagggaagaatttaatttcccactgcattcaaatgattcttagaaagatctgtagttcatgaccctgaatgaagcaggaagacgcagggagtaagatgctggaaggaagaaaggaataagaaagaaatacattcttcggggttttactagggtcgtctctctctttcccatttcctttcctccctccttccccttttccccctcctcctcttccttctcttccttcttcttttcctctctctgtctctctgtctctgtcgctgtctctctctctctctctcttccccacaaacccccacctccgagaatgataatgagattagaccacaggaccagcagagaggaatgttgagtcacagagctggagtcataagcacaccagcatgaggaccaaaaagtcaggaatgaactgagctttcagattctgctcattacaataaattcttgccaaaaaaataaaaataaaaagtgtagattttatttcccttctggttatttcaaaaccaggaggaggggcacttttctttggtcccttgtttaaatcttgtactggaaaacccaaagtgaaatcactagaactacagtccatatggtatggaatgccatgtttgtctgccttccacaaggctagaattttatttgttaatgcattataattaggttcaaaatggaaaggcttaacgattgctttcatatttttaatgctagatgttatacaggaactagtgcagtgatctccagagtggggtagataaatcacaggaagtctaagatagcccactgaggtatgaaaacaagtcaaaagttatgctgatttttataacaagaagaaaaaaataatcataactaatatttaaagtacaaataatggcatcttcactaggtccatatatcaagtgccactcatcatgtttagtacatggggtctccagagggaacattttgtaataaacaggggttgacagtggaagcttcagtcactgatcactttcagcttgcagatcaaattgtctagacataatttctctaatcctcaaaaagtagctttaaaagatttttcaaggctgaagatagtgctaataatataagcaacaaggaaatgtagaactaactcttctgctttggggagaggttcttcgctaatcacatcatgagattttgaaaaacaatggcaattttcatcagatatgacaagacttgccattgaaacaataaaaaaattattggaaatatggacttatatccagcagtattgagaatgaaccgtgcctaaaatgtatgagctaaagataatttttaaaaattagtcttgtttgaaaagttatgaatttttatgtaaagtcttattctaataaaatattagatttttaagaaactgtagtttttttaaattctattacctgcaaaattctctctaaaacttccctgacacatgaaaaattcctgtgctgaaatgctagcctacgccattgtaggaaagctcaaaattatcagaaaattcttcttttaacaagttggatactgtgttcttgtaatttgtttttctatttcctagtcatttaaatattttccagattgaatattgccagttcctaccctacaagtaccatttgtataccctttgctattctagtttctcatttgtggatggattccagtttctctctctccaactcaaaaaactcaacacatcactcaggattggatctaaccatcgtggcaggcaatcaaataattgtcattcttgctcagttacttcaccaatattaaataagaaaccatcaggtaccaagcactttttaaggcactgaggcacagtgatacaaagtatataaagtcttgctatgatagagcttaggctccagtgagctggccacagacaattagttggtaagggaaaaaaataaataaataaacaagaaaaataagacttagacatagaagccagacagtgaagtacaacaaggcaataggtcagagagcgacttggtggctaatttgaattgggtggtctggaatagccttgctgaggaaggttacatgtatatgaagatctagaagaaccttccacacagaggcacagccaatgccaaggccctaagatgggaagcagtttagcattgagaaactgaagcacatctggcagggctggagtagagggaggcagggagaacagtgcaaaatgagactggagatgcaaacaaggaccaaataatgaaagaccttgcatgacatgctaagattatgttattttgtgctgatttcatactgaagtcccttaatggtgtcagtatcaaatctctcactgcttccctttcacacctcataagtacttactgctaatcagccaaccattgctgtaagctctcagactgccacctctagtcacaatactatgagttctctcagctctacaaagcattggccattgccgcatggagagatgcatataaaagttgtctcttcacaatccaaacaatctgctgattcttcctaccttagcagctcatgatatggcactttgtgttcagtgcctggacaaaataatatttctaaaggtcataaattaaaattgtaagctattcctggaaacagcaaaataagaatgcttgattcatctctaatattatggtacttggtattcttgactgcctttttttttttttttaagacagagtctcattcccgtcacccaggctggagtgcagtggcatgatcatggcttactgcagcctcgacttcctaggctcaggtggcctcccaccataccctcctgagtagctgggactacaggcatatgccatcaagcctggctaatttttgtactgtttgtaaagatggagtttcactatgttgcccaggctggtctcaaacccctgggcacaagtgatcctcttacctcaaactcccaaagggctgaggttacaggtgtgagccaccacgcccagccttggctgttttaaagattaaaagaataacaagacaaacagaatcaagagctatcaaaattaggataagaatttaaaattaataatatgagtggtacaataagcatatttaaattacttctccttgaaatgcgacttaagaatttcaaatccctcatagcttcttcctctgtgaccttacttttcaaagtaaaatgttcaggttttcatgacttacaactgtatattcacaaaaacaaatatgttttttgcttgaacttacaaaaggaattttctggcctattttcttgtaattaccatgcacttaatctttgattaatggctcatatgttgacacatagttcatagtttattttacacttctaaatcattctctactataaataaaagatttgtgtcaaaactacacttggaaattttattttgaattgattattaaagcaaagctaagtccactagtaaaatattgttgaatcacaggtgaacctcatttaactgtatattttggattgatctccttcttcttaaaaattaccatgtaaattgatatcgttgaaaaacaattagaaacagatttataatctgtcaatgatcctatacaacactctcctataactcatccttgcacacatgaacacatatcctaaggtacttttactttttgacagtacattggcacacagctcgctcaatactaatgatcactttttacacttattagtgtgactgtggaaaattaacattcaagtttatatgtaataataaactaacttttgatggagtattccatgtacattggtcgttatgaactgaattgtgtctactaaaaaaattcatgtaaagtccaacccctggtacctcaccgtatgactgtatttggagagagggtctttacaaaagctatgaagttaaaattaggtcactagcgtaggccttaacttaatatgattggtgtacttataagaaaaggaagtttagacactgacatgtacagagggaagataatatgaagacacagggagaagacggccatctacatgccaaggagagaagcctggagtggattcttccctcgcagccctcagaaggaaacaatcttgtcaatatctggattttgaactcctagcattcagagcttggagacgatacatgactattgttacagcaaccctagcaaactaatacactggcttataacaaagagtctgcaaaaattagagacagctcatataattttgtgccttatgagaagttattttctggcaatatatctttaagagaacatgaagtaaataccataaggtgacataaaggctttgaaataacaaattaaagccaaagcaaatttactgcctttttgtaaatgggatttactttcaccaaatctcatggtcctataaaagatgacatttgtgaagcattcattttaccacccattggcacttctcacaaagatactaaaataaactggtaaaacagctcttagtcttttctaggcattggctaccattaaaatcttcattttatttctgctcttctttaacataccttcttttagagtcctttaaaaaaattgtttggagagactgcatttttgttacaaaaggactgaatagaagaactattgattcagtgctttcctttcttctccactgtcaacaataattgatgttcctattgaagtgatatggtttcaatttgggtttgggttgctaaggactaaggatagcatgcaaatcaatagaagattaaggaactattgttcccacaaaccataatctgagataaacaccacatgacttcgtaaatctaaggaaatgtctcttaaaactctaatgccaggagattttgggctgacatgatgggattttctaaatatacaatcatgtcatctgcaaacagaaacaatttgacttccactcatgctatttgaataccctttatttatttctcttgcctgattgccctggccagaacttccaatactatgttgaataggagtggtgacagaggacattcaaattttgcatgccaacttgatcctggtggataagctttttgatgtgctgctggattcggtttgccagtattttattgaggattttcgcatcgatgttcatcagggatattggcctgaaattttctttttttgttgtgtctctgccagattttagtatcaggatgatgcagtctcacaaaatgagttagggaggagtcccgctttttctattttttggaatagtttaagaaggaatggtactagctcctctttggacctctggtagaatttggctgtgaatccgtctggtcctgggctttttttggttggtaggctattaattactgcctcaattttagaacttgttattggtctattcagggatttgacttcttcctggtttagtcttggagggtgtatgtgtccaggaatttatccatttcctctagattttctagtttatttgtgtagaggtgtttatagtattctctaatggtagcttgtatttctgtgggatcagtggtgatattccctttatcattttttattgtgcctatgtgattcttctctcttttctttttttttttttttttttttttttttttttgagacagagtctcactctgccacccatgctagagtgcagtggtgtaatcggggctcactgcaacctccacctcccgtgtgcaagagattctcctgcctcagcctcccaagtagctgggactacaggcacatgccaccacacccagcttatttttgtatttttagtagagacagggtttcaccatgttggccaggatagttttgatctcttgacctcatgatctgcccacctcggcctcccaaagtgctgggatacaggcatgagccaccgcacctggccctcttttcttctttagtagtctggctagtggtctatctagttggttaatcttttcaaaaaaccagctcctggaatcattgatttttttgaagcattttttgtgtgtctatcttagttatttcttgtcttctgctagcttttgaatttgttttctcttgcttctctagttcttttcattgtgatgttagggtgtcgattttagatctttccctctttctcctgtgggcatttagtgctataaatttccctctaaacactgtgttagctgtgtcccagagattctggtacattatgtctttgttctcattggtttcaaaaaacttatttatttctgccttaatttcattatttacccagtagtcatccaggagcaggttgttcagtttccgtgtagttgtgtggttttcagtgagtttcttaatcctgagttctaatttaaatctgggtgttcctatattgggtgtatatatatttaggacagttatctcgtcttgttgctgtttcacgcgtccgtgtgaagagaccaccaaacaggctttgtgtgagcaacatggctgtttatttcacctgggtgcaggcgggctgagtccaaaaaaggagtcagcaaagggtggtgggattatcattggttcttataggtgttgggataggcggtggaattaagagcaatgttttgggggcagggggtggatctcacaaagtacattctcaagggtggggagaattacaaagaaccttcttaagggtgggagagattacaaagtatattgatcagttaggttggggcagaaataaatcacaatggtggaatgtcatcagttaaggctgttttcactttttttgtggatcttcagttgcttcaggccatctggatgtatatgtgcaggtcactggggatatgatggcttagcttgggctcaggggcctgacagctgcattgatccctttaccattatgtaacgcccttcttcgtctttttttatctttgttggtttaaagtctgttttatcagaaactaggattgcaagccctgcttttttttgctttccatttgcttggtaaatattcctccatcccttcattttgagcctatgtatgtctttgcacgtgagatgggtcagcccaaaatctccttaaactaataagcagcttcagcaaagtctcaggatacaaaatcaatgtgcaaaaattacaagcattcctatacaccaattacagacaaacagagaaccaaatcataaatgaacttccattcacaattgctacaaaaagaataaaatacctaggaatacaacttacaacagatgtgaagaaactcttcaaggagaactacaaaccactgctcaacgaaataagagagaacacaaacaaatggaaaaacattccatgctcatggataggaagaatcaatatcatgaaaatggccatactacccaaagtaatttatacattcaatgctatccccatcaagttaccattgactttcttcacagaattagaagaaactactttatatttcatatggaaccaaaaaagagcccatatagccaagacaatcctaagcaaaaagaacgaagctggaggcatcacactacctgacttcaaactatactacaagtctacagtaaccaaaacagcatggtactagtaccaaaacagatatatatagaaaatggaacagaacagaggcctcagaaataataccacacatcaacaaccatctgatctttgacaaacctgacaaaaacaagcaatgggaaaaggattccctatttaataaatggtgctgggaaaactggctagccatatgatgcagaatactgaaactgggccccttctttacaccttatacaaaaattaactcaagatggattaaagacttaaacgtaagacctaaaaccctaaaaactctagaagaaaacctaggcaataccattcaggacataggcatgggcaaagacttcaagactaaaacataaaaagcaacggcaacaaaagtcaaaattgacaaatgggatcgaatgaaactaaagagcttctacacagcaaaagaaactatcatcagagtgaagaggcaacctacaggatgagagaacatttgtgcaatctatccatctgacaaaaggccttgtagatccttcagaatctacaaggaacttaaacaaatttacaagaaaaaaacaaccccatcaaaagtgggcgaggacatgaacagacacttctcaaaagaagaaatttatgttgccaaaaaacatatgaaaaaaactcatcatcactggtcattagggaaatgcaaatcaaaaccacaatgagatgtcatctcatgacagttagaatagcgatcattaaaaagtgaggaaacaacagatgctggagaggatgtggagaaatgggaatgcttttacactgttggtgggagtacaaattagttcaaccattgtggaagacagtgtgacaattcctcaaggatctaaaaccagaaatatcatttcacccagcaatcccattactgggtgtatacccaaaggattgcaaaccattctactacaaagacacatgcacacatatgtttattacagcactgttcacaatagcaaagacttggaaccaacccaaatgcccatcagtgatggactggataaagaaaatatagcacatatacaccatggaatattatgtagccataaaaaaggatgagttcatgtcctttgagggacatggatgaagctggaaaccatcattctcagcaaactcacacaggaacagaaaaccaaacaccgcatgttctcactcatgagtgggagttgaacagtgagaacacatggacacagggaggggaacatcacacactggggcctgtaggagggctaaggggctaggagagggatagcattatgagaaatacctaatgtatatgacgggttgatggtgcagcaaaccaccatggcacgtgtatacctatgtaacaaacctgcacgttctgcacatgtatcccagaacttaaagtattaaaaaaaaactcaaatgccaatttgcggtgtcaagcaaatgccagcagtttcagactcatgagtaaggaaaaactagaaggctgtaaaactgagaaagaagttattgtcttatcagcaaaacaattttaatgtgtgttctgttagctgtataaactggaatgtatgagccatttttcaaaaagaaagaaacaacaacaaagttcatttctagtctttgtaataccagaagcacagagaaaaaattacattcagattttgtccagaattttagagaaagtttatgctcacatccactatgggaattttgaacgctaaagcaaagtagcctctcctctccattgagaagtcccatcatcctatccataaaattggtaattagacacagttctaagtcaatcacttctctccgtaatacatacgaagtgacattcttctattcctatctaaaacaaaggttaagagaatgaggataaaaacagagttgtgggttctgtttgctgctgtcatcgaaggggaatattcacctagtcagaagagggtggcagcagtggaatttagggcatgatgacacccacagtcatgtgtctggtcccatcactgtcctaagacaatagtctgttttgtatcaggctcaagtcaagtgactatgattatttgggatctagagactctagagaaggaccctggaaagatctgagaagaatatcaagttcctggcttaatgggctggaatatggaaccaggcacagagaggactaggaacactaatcaggaacccaaggcagaaagccagatcaccagctgaacaaacaaggtagcctgtctacacctgaggcactcacacttactcatgattctgagcaactacaccaagcaccaaagaggtcagctgcagacctaggcctaggcgaggcttctcctgtattaagcagaatgagctaatagatgtcaaggctcagccaaactagggatgaaaggcagagtgtaagacttttgtctggtaggtgaatagctatatttgcatttatgctactttggtttactattagaacaggcctcggcctttttacaaatcctcagccttttacaaattgctaagtcatgcacccaacttactgaaatcaactgaggaaaagtcacattatcactgagctctgcccataggtcagtagaaaatgataaaaggagagattagatgcaaaaacaaacaggtacatttttgcagagctgtcttgtttcaagaataaagttattttaggagaaggattattcaaaaattttctataaagaaaaaagctagctattgcaaaagatacttatggaacttatattaaaataagcccagtaatcaaaacatacttttagaagattcttgaaaatattacaacaggtaggaagcctaacacaatccagtctaatcctttcattttgcttatgagaaaactaaagttcaaagagattatttttggtggctcatgcctggaatcccagcacttcgggaggccaagggggtggatcacttgacatcaggagttcgagaccagcctgaccaacatggtgaaaccccgtctgtactaaaagtacaaaaacatggtggtgcatgcctgtaatctcagctactccagaggctgaggcacaagaatcacttgaatccaggaggtggaggttgcagtaagctgggacccggggccatgccactgcactccagcctaggccacagagcaagactccctctaaaaaaacataaaaattaaaaaattaaaaaaacagagactatttctattaccttatttggcaaggtaggtagattaaggtagatagggaatgataccagatggaaatatggatctacacgagaaaatgaagatcaccagaaatgtaacaacaaggatgaatatatttattgaaaatatcctgtaaaagaaaggatttaaaaaatcattctaagataaacaaaagctgaaagaatttgtcagcatcaatctgcactagaagaaatgctaaaggctattctccaagctgtaggaaaaaaatgatatcaaatagaaactgaaatataccaggattgaaacccacaggaaacagtaaataacaaatacatttttattgttgttcttataatttccttaaaagacaactgactatttaaagaaaaaaaaaagcattaaatggtggactttttatgttatatgtaaaagatggcacaaaggatgggtggagtagaaaatagaattaaactattatgcggttattgcaatgagaagtgtattaagtgtagttatagtaagtgtaagtgttaactaggaactatgaagtgtgaagtagtaaactttgataagttttagggctagaacaactactaaatattaataaaaagaagtttaactaagaagtcaatagagcaaataaaataaatcctaaaacaaattagttaattcattgttaagaaaatgatatggcaagcacagattgggagcaaatatttgaaatacatatattcaaaaagagcctatattacaatacataaagaactcttacaagtcaataataataagacaaacaatgcaataaagaaaagacacgccagacacagtggctcatacctgtaatcccaatgctttgggaggccagggtgagaggatcgcttaagaccaggtgtttcacacagcctaagcaacacatccaggccccatctctacataaacaataaaatgaaataagttaaaaatttttttaaaagggcaaaaagcttgaacaagcgaaaaaagaaatacaagtagccaacaagtacatgaaaagatgctcaaggtcactaataatcagagaaatgcaaattaaaattgtaatgagacactacttcaaacccactcatatacttatatgacccaacaattctgctcctaagtatttaattaaaaaaataaaaatttgtattcacagaaacatttttacatgaatgtctacagcagttttattcataagagctaaaaactacaagcaatccaaatgtacattaacagctgaatgaatatgccaattgtggcatattcactcaataaaatactggtcagcaataaaaaggaacaaatactgaaatgtgcaacaacatgaatcaatttcagtgacattacattgaacaaaagaagccaaccacaaaagaacatacgtagtatgattccgtatatatgagattctagaacaggtaacattaatctataaggatagagatcagagcagtgcactgcaaagaggcatgagagaaatttctggggttatggaaatgttacctgttttgatcaggacggtggttacacaagggcatacatttgtcaaaacttactgaacactgaaaatgggtgcattttctatcacataaattatgctttgatgaatctgatttaaaataaaattaaaatgtgctctgagcaaaatattgacagtaacagttcttgtccatgctccaacaataaccatctgtttcattttagcctccccacgtttcaatatcctgatgagtaagatgaagtagttgaaatgaattatttgtaagcgctcttccatttgaactgcttccaatgctaaaattaacataagtcaggtaccatccataaactttctatacctagtgttattcatgtaccttatatgtataaagatttgtgtatacagtgaggcaggagaataggatctggaggcagggaacctaaggccaattcacactgacttcctagaactaaatcaaaaggaaaaccccaagttaccacacctaagtaacaaaaggaccagaggctactttctttgcaacctccctgctctttttctgcctggcagatggaaaattgaaagtaccactgattggttgctttccacaaccaatcagacatttgcatagggtgtagcctttgtaacatcacttaagtctctgactggttgctggccactacttcatttgcatggggactacaccaagtgtccaatgggaaacctctagagggtatttaaaccccagaaaattctgtaacagggctcttgagcccctatgctctgcccactccaaccctcaggagtgtactttcattttcaataaatctctgcttttgttgcttcattctttccttgctttgtgcattttgtctagttccttactcaaaagccaagaacctgggtaccctccactagtaacaatagcatatgtatctacacagatatacacatatgtatgtatacaatacatacatttatatatagtataagcttcctttttatttgacatgctaacttaatagtattgatattttaaaatatcaaaaatatggtgtttttattttataaagactggatatggttttaattgatctttgcaaccactatgagttaagaattgcttgttttgactgcattattataaataaggccaactttagtttctgtgatattctttggagttcagattagatcacaggttctgcaaaggttttcttttttttgagacagagtttcactcttgttgcccaggctggagtgcaatggcacgatctcggctcactgcaatctctgcctcctgggttcaagtgattctcctgcctcagcctcccaagctagctggaattacaggtgcctgccatcacacccagctaatttttgtattttttagtaaagacagggtttcaccatgttggccaggctagtctcaaactcccaacctcaggtgattggcccaccttggcctcccaaagtgttgggattacaggcgtgagccaccgcgcccagcctgcaaaagttttcttgaacagtcctactgtttagaacaagtgagcgtcacgtgctgccattggctttttcagaatcacaagaagcttttagcaccctgcatccatgtgctctggcattaactgtgttcacacacatccctggtcataatttattgagcttgcagtattaaagcatcagaatgaaataaatcccaaaatattagttaaagtggggattcttgaacttacctgttcataagaatcacctgctcgcacccccaacagaccaagtgagtgaaaattcctgggaaggcttgggatctacattttttaagtacagcccttcctcatccctccccatacacaaggacttttaagatcacgcaagtctgggaaacacaggcataatgtgagaaaccatagaatttaccccagagtcttggcaggtctcttctcaaagacatttgatgcatttagtgtgcttggatttggattacctctttctctaaagtctcactggtaattagaaaggaggaggtgggtggcaaattataaccagacagccagattctgaagccaagggagacagtgctgtggtgttgtctccagttataaataagtgggcctaggtttagcgtggtcacgcaatcacctcgacatcgagcagatattccaacccagatcctacacatcaaaatacatcatggcatttttcatccaaaatagccagaatgtgcacttccaaagcaaaggccctaatataaacaaatgctcatgtagacattgggtatgtatctgacagccaaatattggagctatgcagagcagctagaagagtggaccgcaggcagcatggcaagtccagaagacagctcacttaaaacatcatttttaaaatgtacattcttaaagccttaaagacaagactcaaatctgatccaggaataactgtagctgccatctctaatttaaaaagcaggtgataatctcattttccagccctcctgtcatgtgaaggttgtttatctttccatagagacataacctaccagtatccaggtttccgcaggggcctggaaggcatatacagtggctgcataaaccagatcaggggatcgaaggacaagcttagtccactggtccagagggaatcagtacagcttagtcttctcaaaaccccctttgctcagtttctttttttttttttgatatattattttatttaactttcaaaaagattttattaaagtaacaggatttgagagtcataacttcacacaatttgtgagtatgagtattacaatttgtaatcaagtatatctgactccaaatcctatgtattttccactacatcttaatgccacaatgttaataaaaggataaagctttaacatatcttaaggccgatttgctgtaaagttataaagcttaattaatcattaactttcttttttttcactggccatcagagaaacacaaatcaaaaccacaatgcgataccatctcacaccagttagaatggcgatcattaaaaaatcaggaaacaacaggtgctggagaggatgtggagaaataggaacacttttacactgttggtgggactgtaaactagttcaaccattgcggaagtcagtgtggcatttcctcagggatctagaactagaaataccatttgacccagccatcccgttactgggtatatacccaaaggattataaatcatgctgctataaagacacatgcacacatatgtttatagcagcactattcacaatagcaaagacttggaaccaacccaaatgtccaacaacgatagactggattaagaaaatgtggcacatatacaccatggaatactatgcagccataaaaaatgatgagttcatgtcctttgtagggacatggatgaaactggaaaccatcattctcagcaaactatcgcaaggacaaaaaaccaaacaccacatgttctcactcataggtgggaattgaacaatgagaacacatggacacaggaaggggaacatcacattctggggactgtcgtggggtggggggaggggggagggatagcattaggggatacacctaatgctaaatgacgagttaatgggtgcagcacaccaacacggcacatgtatacatatgtaacaaacctgcacgttgtgcacatgtaccctaaaacttaaagtataataataataaaattttaaaaaaagaaagttaatgattaattaagctcagttttttatgtaggtttaacagtgactaaggaaacaggaagtcactagagagtaatgaatctccccaaacaaagtatgtgtgcctctctcaccaacttcaatggggttggggtgcagaggaaaatttagatattccaaaactgacatagggaaattttgatccaaagctctccctcttcctggtttataaatggacagtttcagagggaccagctggtccagtcccaggaaaacttcaaaaacatcatactaggaaaggagacaatatccaaaagattatctgtggaatcaggtgagattgctttttattgtaaaaattctggaaattctttagcaaatgtgctagtaacattcttaaaatatctaaacctgtaaaagtttttctacttccgtaatgttgcttggtcaaccaggattctctacttcaataatttccaatcctagctgaatggcaggtctttttaaaaatacatattctaaaccccaccctaattcagtggtcttggatgagatctggaaatatgtgtagtagaaaccctgacaaaattataactagcatacaatttgcccaacccaaaagtttcataaagcaagaaatcagaaaaaaaatggcatatgtacatctttaaggttaatcctttatatgaaactaaaacataaacatatgcatttgacagactttttatgtcaagtacaggctttttctcatataagtctactgattaaacagtaaagccattttcttgtgtatttcacacacaaagacaagatatataatctccagttttagtttctttggagtgaagacttcaagactttgttaaaaaaaaaaaaacaggagcctaacctcttagatttaaaaaaattttttttatcacttacagttgccctgtccacatacaacaacaaataaatggtatcactctcttcacactcagattttatcaatttatattatttacattgcaccatcagcaggcttatgaacaaacacaacagtatccagtaaacacaatcaagtggagtgtgcagaaatgctttggaatactagagaattagctacaaaccaggactagtcagcttgctgtggtaactagtcaatatcttactgaagtaaaggcgaaagtttgttaaaacaatgagtgagttgaataagactcatgaattatctctgtacaatatatttctgaagagctctacacataagcaattatgatggttatctaagtttgtgaaatattaccctatatcagagtttctcaaacttaaatgtgcatacaaattccctgagagtcttattaaaatgcagattgtagaaatcagtgtgtcttgggtggaaccccaaaatctaacagtctcctagcttttatcagagtaagaactctaaatgagatctctactatgtcacatgtttttatcagttgtggcagcaaaattgtagttgaaagtgaattttcttgcattttaaccttttataattaaataacttcaatttttttaaacagaagagtttcttgaccaattattctcagtaacagcataagatgttttcattttttccaaccattcttcggtttagtagaaagaagtgttagagagcagtcacaaaatgtgttttcattttctatcgatgtcaacattaccaagtctgtttctctgtccacacggtaaaatagaaatcaaactatttgttcttataacttttggcttacaggggaaaaagttatatttatagaaaactttatcaggatggctgcttctaactctctcttccaattcttgctgtacagtttggatttagctaatgacagtagctaaaagaaaaccaaaataagtgatttcttggcagcaaatgcctccctgatgaatcaccatagaaaagatagcactggagtttgacggtgggatgagcaaaaagcagacgcagtgtagacaggttttctcctgctgcaagtggcttatttcaactgtcaacacatcacataagaaatttatagtcagagtcctatttcctcccattcctatggctcctagcattactgccacttgatcggaccccattttcacaatccacagcttttctctaaaaccagccaccaaactctgattgtgatacactcacccactggatgagattatggggactgacatcactatagaaggagtacttgctccaggtggcctgagaggaagcaagtctgaacctgtgtactgaaagggcaaggctgggtctctacagaggttaggaatgcagtcctcagttgtcaaaaggcctgccagcactagtgtgcatagtcacaaagagaaaatgaacaaagctgtctctccccatgagccaggatgatccacaaatacctcacctttactactgacatcatttactattgaaaatccacaggtgagatcttaaactcctacttaggtggaaactgtgattctaaaagcacacagggcaattctctgggtctatttgttttcaaaattatggcaacttttttagggaatagaagagactgaacaggaagcctaccaaataaatgggctgttagtagctaagtctggcagtcatacccacattcccaagtatttttttaaatgccaagtattttttaaagttctgttcttttagaaaccagaggcccatttcagaatataacaggaactgtgaacccttttctcaagacacaaaatcaaccttctgtatatgacttcgagatgacttaaagagctttttcctctgcgtggctaccaggttacaaattcccattgtaatacaatacgaatagttctctgagccattgcaaagacaaaggtgtaagtaaataagcactgtacactatgctcagggtaagaagttcagcaacttctccttctgaaacctatctgccatccgtctccacaccaggaaaacgttagggcggtaacaggaataacctactgtgaagttctgatagtcaccagcttcctgtgctgggcccaatggaacaggcttcggttatctaagataattcattctgtgccagctacagtgcctgtttaattgttcagcgtttcatgttcgggaactcctttccaatgactgactgcccgtggcgtcactgccattctgaatcatgcaaatgagaatgtcatatcctctgactcaagaagctttatctcattaaaaattattttgagaactccaagcagagagttggtctttgcttagatctgacttcccaaatacatcacttttccttttctcacggggatccagctgatttggaaggagactgggaagtgtgcaaggggggaatcctatggaactgagcttgggaagcaggtatttgctggcagggatgctctcctcctttgctgagaggctgtggtccacagcccttgccaaatctgtcgcagtagctaacagtacatttccatgtatgtactattttctcccaattttccccaaggaaagggcgagtcaggatatgcacgcatagcacaggacaaaaatagccttgtttaagtagataagtagctattaagtgaagttccttgactttgtctattctgagcaccagtatttgcactagtcaggcagcatccccctaggtcaactacctgtgtattcttgtactctctactgaaagacagtatgcacagggcttatgaaaacagacattagaaataggatttgagtccttggggtagttgtgtgacttactggttatatgaacttagacaatttaccgaacctctctgagcttaaatttgctcatttataaaatggggtaatacaagtttgtaacttatagacgtattataaggataaaattaattaatatactgcatataaagtttctagctcagtgactgacacatattacgtgctatgtgatgcatatgttaagtgcttgtgaaggttagctgttactattacaccaggtattcttgaacatttctttaactcagagttaaagccaggaaagacatgtgttacatttagtttaaaggataaaaaacaatatagcatagacttgggagtctggtagtttatcacgcaggtaaatgctatagcagttaaaagtcagcaaagttcaaaattaactctgaatgatctatgatctatgtgtttaatgtcctcatctttttttttttttttctttagatggagtttcgctctttctcccaggctggcatgcagtagtgccatctcggctcactgcaacctccaccttccggtttcaagtgattctcctgcctgagcctcccaagctagctggcattacgggtgcctgccaccacacccagctaatttttgtattttttagtaaagacagggtttcaccatgttggccaggctggtctccacctcctgacctcgtgatctgcccacctcggactcccaaagtgctgggattacaggtatcctcatctattaagtaataatcaagtcttcctcatgagattttaatggcacttaaatcaaaggaagtaaaacatcaagcccacaaggattaagtgtacaattaatgttagtcatcattaccactaaaaattaacatgagcttaaatatatacaaactatagaatataggcagcaggctccattcatttaaaaactactgatactacactactgtgtaccaagcatggttctacacatcttatttaaaaataactcatttatttaatcctcataatagctccaggaggtaggtactatatcacctagccctattttaaatatgaggaaacagtggccactccattactaagttgcagactcatgattcactcccaggctcccaagacaatgctctttcagtgctgtctaatagaactttctacaataatggaactgatttgtctgtgctgcccagtatgctaggccctgggcacgtgtagtaattgagcccttaaaatgtggtaaatatgcttgaggaatagaatattttatttcatctcattttaattaatttaaatttaaatagccacaggtggctggtggctattggacaacacatgcatagaccaccccgttgcattgctttattaaagggccagttccactgaagaaactagtagagacccttatccacactgtgcttgttccacacttgcctacagtggttgtagttccttcattcgggacctttattactatcttctttaaaaataagttgccttttttggtacattgagtatcttcagtacaaggaaattttgccttcaaaataccccactaataatggttcatcctgtaactttttatcccttttgcctacttgttgtacttgcttgatgccagacactattctctagccacaggttacatgcagctttccgcacatggccaccccatgttctccagttaggacacgggttctattttgccctcttttgtagagctagcaactgctttattgttgtctgagctgaaaatggagccttgatggacaaaaacagacatcttatcactttttaacgtaaaaccatcaaacttggctttccgttgatccaccaaattatgcttttacttttgcctccatttcataaaattaactaccctaagcatgcctgtctaattgcaaatttccattccctcatgtccaacctctgcctcccactgcaccactgtaatttgccaagtgaaacctgcccaagttcagagagactcaggcaaacaaaactcacgaaaaggagtacttttttgtccggagttaaatcaatattgcaatgaagaaaataatctccttagaatgacagtacatgcatcttgcttcccattcccattttatgtaattatctgtgctgtgatgctcgatccaaacaagtgctgtctcatttgtaatcagggcagagagtacgactccatcacttttacccgagtccctcatacagcattgcttgtgatcagaattttcaaaactgcatttccaaaatcacaactgggatcatttttgcttagaagccacgtgacagaagcctcacagacaaacctgaaatcttaaacaagctttaaaagtatgacataatgattatccgataatgtctaaaagcaagtggcacattcaggtagttcagtttgatttgctgtgctcagagtcgactgggtagttcatgtgcaaatcttctgctaagtcatttcctctctttgttttcagactggatttccaagcaaaatattcatatctttttctgtacatagactgactcagccttgccacaattttgtgggcagaaagggtatgtgtgttatgtacttatcttattcatcattgtatgatattagggtggtgattctgagatatgttaatttttcttgttttcattggattcttttctttccaaccttcattcctattgatgtgttcataggttatcatttgtgtgatttttgagacacaatgaatcaaagggattaaaagatcacttggatacacaattttttcattgatataacagtgggcacttgcctctgcatgtaacagaaattaaaaaaaaaaaaaatggaagaatccccatgtgttgctctcaacagagctgagaatcgcattaccagaggcatgactggcgtagacctctcatgccacacaaatgcctcacttctccacctggggttagcaaaaaactttcagtcaacacttgcattcatggctcataaatgttgagacttgagcagccttcttgctaggtgggtttctatgcgggggtaggagtttactctgaaattaattgtagaatttctctaggaagccaagctagctgaattcatttattctgagttcagaattatgaaaaagtgagaccagttttaagttttacattttgaagaattttaatataagcatgatagtttacaactgctgtgagtgagaaaaaaaattctctgtgttcttgcttctaatttgatttgaatccataaagtatatctcaatcagaaagcaacttgttgtaaaggagaaaaatagaatttatagacatgaaaataaatagatgaaaatcatgggtggttatttgatctttagaaggtacaaagtagccacaaattatgggtaccattttcttccacattttagttttacattcctgaaacttggggtatgcatttattcaatagtcattcaccctgctaagcagagggaacacaacgaaaacaagatacaaatcttgccctcaagaagctcacaatctacttagagggtattaacataaatattttaaaagaaagtccttaagtgtaggggtaggaatatgaatggagtattagaaaagcataagcaaaggcatctaacccatcaggctttctggaggaggtgggatctggtctgcaatttgaaggttatgtagagggtcactatgtgaaaggaggtataggaagagcaaaggaactggaaggaggagcacggtgcacaggcaaattaagtgtttccacattgccagagagaaaaccatgaggtacagattaataagagctaagcctggagaggccagcaagatcctgatcttcagggtcttacttatagcatgtggtggaaagcattctgccgttttaagcaaaggagaggacatgtctgattttgtttttagtggcgtatgagttggtttgtgctgcaaaagaaacaactgcctcaaaacctagaggtttaaaagaatgaatagttagctcatgatcctgagggcagttcttccgagcagcccagctcagctcattctacctggccctctcctgtgtctgcagtcagctggcaaattgtctggcagctagatgatccaggctggcctcacgtacatggtgattgggggctgtctgccggagctccttggttttccaccacatggcctcatatgcaccagcacgctagcttgagctcactcacatggtctcaggattctaggacaagcaagagtgaaatctgccaggctatttgaggcccaagctcacaatgtggacaacgtcatcaccaccacattccatttcttaaagccagtcacaaggccagtctagattcaagagaggtgtagtggagaggaatggctcgcttttatgggagaaactgtaggttttaccaaactgctacagagaaggacaaccaaagacaagaaagccagttaggagatgctgtgtactgtagcctaaaaatgagataatgggcctaatctaaagaagcgatagcaatggagaaaaggaaaccaagttaagaaaccttcatggataaaatggtagaatttcatgattgactagatcaagatgagaaagaagaaatctctagtttgaccaaaagaaagatagaaactaaatatttgtgtgccttatgtgtttattgaattatcttaacaacataccaatggccaatccttatgcaagtaccaggtgtgcatcaagaaaagtagagaagaatgtggatcaattttatttagcacatattaatttaacacccccagttctagtgccaactaacgaccctaccttcaaggaattaatacttcaagaaacaaggtacacaggaaatcaggtaataatagaaaatagtaactgatcaaatgataaaatatatagtaaagatagaaagtgatacagaacacagaaggaaattccagaagagtcagggaagtcttcatggagcaggtgggacctaaataaggtggattttataaccaaaaagtctcataaatattagcattatattaatttatccgagtatcatctatatgactagtatacatacttttaatgtcttttccacattccattgctaagagaattgaaataaatagttattcaaatcatgttcaatattctgtggttcagacgaggaaccctgattaagaaaatctggtttacacattatttcttgggattcagattctagttgttaaaaatctgtcaaaacttgtgccagtaatgagccaatcatccagtacaaaggcatgctaggagcaaagccagattgaaccaagagaaggtattaggaaaccagcagggatctgagggggtggaggaggttggagggagagaaagaaaggctgagttgtaatcctggagacaaggtcctattagcaaagaggcctagggaacattcactccaatttagaagagaaaacaaagtccagaggaaacccacagtctctggcacatggaaaataacaatttttaaatgaatctacagatagatagaagaatgcaaaccagggaatggggagggaagatatcaagctgtcattctgagagttccgaacagtgtggaattagaaaatgaagagtagcagacgcaagtaggaagcactttctaccaacctcccatgatgaccagtgctctggggagatggagacacaatggagagccaagatctttaggctcatgatggctcaggaagaggggtcaccatctaagagtccttcaaaagtgcttggagctcttgtgcgagggcacaggatggacacgaatatttctaaattttctcgtatccagcaaggaagctgtttacgtaataattcattgagtttggggaagagttgagtcaacatgcagatcctagaaacaatcagaatggtactacagcggaatcaggggcaaccacaaaccaacagaaacattctcaccctaaatcaaattaaggtatctctgaaatccctgcatctgcagaaatctagctatctggaaagtttcctctgacaactactactaccactgagtacttcttggagtccctagtggatgtctgatctaggcttcaaaacaaatccaatcctctaggacttggctgattgatccaatgtttctttctcatctgcccagctgccttctggtttatgtgatctgccatcctccaacaccctgccttttgttctaggtgcatccacttctaattaacatttcaccttctgtctaactctggtctgccctgcaggagatcatggctgctatgaagaacaatcacagtgctaagtatgtatgatgttaggtgaagacaccctttgacactctcagaaggaaattaaaggaatattctaccctaccgcgcatattgggcttttagtaaaaattgttgtaaaaatttactgttaagaaaaactgactagtgcctctttgttattgtctttttctttctattccttttttcatgcttttttcatctgtcatttttcttttgctgctgtaaactcacaaaggaataaaaaaatccttgtttcctcactttcaccacagatagaaggtaccagcaattgtgtttttaaaagtctaaactctccttcaactacaactccaggggaaagtacagttttcatatttcggatccataaagatagaagaagtcaggaagagtaatggaaggtgatgttttgaactgaagagaagtgccccaatacctagggtggcttctttgagttaaaagaaggcagtggtgacaatgaacttgcagtgtgcccccctcctacccacagacaagggctgcagaacctctaaaaaatgggctatataatggcttaaggcctgaccacctggaagtcttcttatcctgagcccagagccacccatttcctaacagaacagataaccctaaacaatgagcatctcaaaagagacaatgatggatagaaggtcaaaggatttaccccaatcttctggattggaaaagctccttggttgttgtaaagactggacacccagcaaaacataactaagtttaaatattctacaaaccctaatgaacaggaactgagagatttatttcacttagaaaaatatagtggtttttgcacacataagtgaagcacagagatacaaattatacaatttcttcagtttttattatcaagtctctctctctcagctagaactggaccagggatggatccaaaaacaaacagaaagccatattcagagcagccacttccctcacacaaccactgcttggctgtcaggccaagcttatctttctggatctctgtccctgaggataaattctctcccacaagattcaacaatgtctactgcaaataggcctctggtctatctgccacatcagttagccaaatgtacagatggttctgaattccagaggtggatgaatacatgtgagactcaagccatcacgttggggctcaaaagaaatttgatgttgaaaaagtgagaacccctgacatattagtaaataggcaccttcaggagcttactgaatactagtagtccattaaatgttgaaacaaccccaaaatttcacattaagagtttatttcttgctgctctaggctgaatgcatgtgttcccccaaaattgaaaagctgaaatcctaaccccaaaagtgatcttgaggtgggatagttcccttgacccccttcatgggcaggaactggagggactcaattcagtcagcctgccactggccactcctcatgggagggagcgtgcaagcaagtaagtgtgggaaccggagtgaacaaatgctggaagcatccggtcactcttctctggtgggagcaggctctacgcaggcccagcagcagtgtccaagcgtgttactaccaatcctctttcagctctgctctctggggatggccaagtaccaaccagctcagtggagggttggggtggcagcccctgccctctcaacaccagggttcttgtctggtgtccaagaagaatcaggtcacatgaactgtttgaaaggtgatgaatgcggaagactttactgagcggagggtggctttcagcagaaagggatgggaaggtgatctttccctgaagcccagccatctccggccagggccctctctgaagccgcaccatccaaagttagctgcctctaactgtagtctctgacagttgcttctctgctcactgctcagctgcttgatacaagctgtctgaataacaagcatccttcatgctcagccacttgtgttgctctgccggctaatgtcttttataagcacaggatgggggcaaggcagggcaaaaaggcaacatttgggtggaaaaaccaggtcagctgttttcgcttagggtcgcagttccagggtaagggtggggtttagccgggaacccagcccttctgtatcaatagtactagaagcttgggccttggcagtggtcacataccccacagtctaaggctggctgggtagctgctgccctctttggacaggcatgtgttccccacagtccccaccagttcctactgctttgctacactgaaggtgtcagcaaccacttattgcacttgctctgcactatggtctgaatgtttgcgtaccttcaaaattcatatgcagaaatcttcacccttaaggtgatggtggcaggaggttgggacttcagaaggggattaagtcatgggggtagagccctcataaatgggattagtacccttataaaagaggctgaagagagactcctcacccctccacatatgagaacatagagaaaagattatgttgactgggtgcagtggctcatgcctgtaattgcacatcaagagactgaggggggaggattgtttgaggtcaggagtccaaaaccagcctgggcaacatagaaagaccccttctctagagaaaaaaattaaaaattatccaggcaaggtcatgcacacctgtagtcccagctactggaggcttaggtgggaggatcgcttgagcctaggagttcaaggctgcagtgagacaggactgcagcactgcactccagcctaggcaacagagtgaccagtaagcaggtccttaccagacacctatgctgcagccttgaccttagacttcccagcctccaaaactgtgagaaatgaatgtctgttgtttataagctatccagtctatgataatttgttctagcagcctgaatagactaagacactagctcatgtaataatcaaatgaagtcagcaggaagctctgctccatgtagtcattcagggatgcagtgtcctgccatcttgtgatagcagcatgttctaaggcttcatcttcctctacattaagccagtgataggagcatgaagaactgcatgtgagaaggttccatgggccaagactcgaagttgtgtgcaacacttacctcccaattccattgacatgaattcaggcacatcaaaccccactgtactgatctgttctcacattactataaggaaatacccaagactgggtaatttataaaggaaagaggcttaattgacccacagttccacatggctggggaggcctcaggaaacttacaatcatggtggaaggcgaaggggaagcaaggcaccttcgtcacaaggtggcaggaagaagaataaccaatggagaaacttgccaaacataaaaccatcagatctcatgagaattcacccactatcacaagagcaacatggggagaccgccccataattcggtcacctctacctggtctctcccttgacatatggggattatggggatcacaattccaggtaagattttgggtggggacacagcaaaaccatatcacccaccatcccaccaccaccacctattggccactgcaaagaaatatggaaaatgtgtgcctagaaattagtggaaattagtctggtaaacaatcagctcatctcaagttccagccacagaacatcatagctctttctccctgcttatgtttcttcactctgctggatcaaatgagctaataactgaggaaataacaaaacaaagtattaaattctgactactttccaatggcctaaacaactcatagagtcttaattctttttgtgaaatttaaatcctgaaaatatttaggtaaatcaatttctcattctaataactatttcataataaattggctaatttgttctggtggttttgatgaccaggcaatgtaaaatactggaaatctaattttttgtttctcagaaatgtacaaatactgcctcactccacatttttgttaatctgatgagagattggcatttgagtttaagaacctctctagactgaggccagtgctctggggcctggagacttggccacagattcgaaggttttttggtgagttataggaatggaactgaatgtgcatgcccttggggtaggagtgccctcatcagggaaactacagagttacctccttctcctcatctcaaagactatgaagtgagtctttgaggccagacaggtaatctacttgtcctccttttgggagttccagatacacacagggcacattttcctgccagactctgtttaattctccatgctgcactgcactgtccttttactaactgcatgcatccccaagcttacaccaggaaattcatttagggagggtctcagataagacttctcttaatattctgtgaatttagtctatctcagtcagcctctgtttctaataaatgccttctactctaaacagatttgaaattattccgtttatctcactgtcagcttttgtccaagatcctgttcagttatagactgccatacacaaggtaagaataattcaaaagtttcagagacctataaaggtactgaaggattaagaaaaattgacacaaattccaaaggaaaaagactcaaaaagaatttttcacatcatggtcccctaaatttctgcataccatcaacttagctgttttttttttaacagtacagattcctgagccccattgttatggtctgaatgcttgcatctccccaaaattcatatgtggaaactttatcaccaatgcaatgatattagcaggtggggactttgggagttgatcaggtcatgaggtcagaacccttgtaaatgagattaatgtcctcataaaagagatctgagggagtctgcccctctcatcatgtgaggacacaagtagaaagtgctatctctgaattaggaagtaggccctcactagacaccaaatctgccagtgccttgctcttagactttccagccttcagaactgtgagcaataagtttctgttgtatataagccacccctgtttgttatcacagcccaaaaggaccaaggcacccactatatacctataaattcacattctcttaaggatagagctgggattcggaatttttaaacaaattccccaggtgattttaattcatgttaaagctgagaatcatgaaagaaaaggctaattatgaatcaaaagaaggttgtgagggtcacttgatgaaatatctgtgtcttgagagagaacatctggcacatgtttgcagaggtttgatgtctgtatgttatcattataatatgagcagcatatggatgactatgaagagaaagagggaggtgctccttcctcctgcatcaacctgtcatctcaggaaaagcctgatgtcctgatagataacccataaatagtgagctgggtgattcacttaagcatatcctgaaggacaccatgccctatccctgcttcatacataaaagattagacagagggagaagaggatatgaggggacaactgcctctttcttaacatttccctgagagtggagggggaagaacattgaccttgtcctacctccttcaaaggtttgacccaaataactctctcataaagtttgagggtatttcagttatctgttgctatgtaacaaaccacccccaaaacaaagtggctcaaaataacaatgttatctccatggttctatcaattgacaatgttcagtcagatggccttatttggtatttttcatatagcatcagtcaggtggcagctggatttggagatcactaaaggttcatgggccatgcatgtaaaatggctcactcatatgactaggaattgatgctgagtgtcagcctggagctcagctggggttgtcaagcacagaacatgtatgtggcctctccatttggcatgagcttccaacagcattggttggggcatggcaagtctgaaaaggactgatccaagagcaagtcctcttgtgaactagtctcataagtcccagaacatcccttctgattcattctactagttaagcatgttgcttgggccaatccaaatccaagagaagaagaaataggctcctgttcttaataaggggtgtggtaaagtcatattggaaaagaacattaagggtgagagatattgtcgctgccatcttttgaaaatatgattttctatagaatgtggctctgaaatatggtacagagattgtttttgtttttccaccaagggaacttggaagaaaatgcaaaaggtacccaagattctgaggatgggctaatacaaatccaaaaggtggtacagaaagtagcactgggggccgggcgcagtggctcacccctgtaatcccagcactttgggaggctgaggtgggctgatcacagggtcaagagatcgagactatcctggccaacatggtgaaaccccatctctactaaaaaaaaaaaaaaaaaaaaaaaaacatacaaaaaaattagctgggcatggtggcacgtgcctgtagtcccagctactcaggaggctgaagcaggagaattgcttgaaactggaaggcagaggttgcagtgagctgagatcgcaccactgcattccagcctgggcaacaacagcgaaactccatctcaaaaaaaaaaaaaaaaagaaaaagaaagtagcactgggggaattctgaggggccaaccaaaaactccacccaacgtcacctccctatggttcattatgccttggaattatagcagagggaacaaaggctggaaccacgcattgcctgtaagaattccccaggggcgagggttgagggctgcagaaggccaccctgcagacctcttacatgaagtgaatggacaccacaaccatacacacacataccccattctgacagcaaagaccaacacaaaaggccctcctccacctctcctttccactcaggcttgggatgcactgagtagtgctcagaggatgcacaggcattagggcaagaacaagagggagtgattgtaacagaaagatcaaactttccctcttctctaccatgttccttgaagctgagctgaagaccattatgggggatagtgattcttgaatgtgactgaatatttactctacatgagacttgagagtgtaattaccagattataatgcaaatcactagtcagaactgaatttatcagcagaggctgagatttcttaatggtgttttatacttttgcctctttgcatacctccttcccattcagaagtccctggaaaatgttaggaacttgaaaaattatgacagcagcttaaaaataattattccatgtttggacattactaagatgctcagattgctcctgctaactttatgtatgtaaatacttttttgaaataaagcatttgacccactttccactggaaaaatcctgagagttaaacctaatagttgcaccagaggtggttctttggcaaaaagtaggttatgtatggggtgttttggctcaatagaaatacctattttatcctggcaatagagctgtgtgatcatttataaatgtctgtccttgtcactagtctgtaagatccctgaggacagggaccaagtctgctttgcccattactgattgcatctctagcactaaacttggtgcctctcacaggaaaggtattcaggtaaggtttgttaaatgaataattaaattaagttgatgagtcaaagaagcccagaactctagcagtagaagagacttttgagatcatttagttcaaccttgatcttctatgttgtgattctgagatccacagacattaaagaacccactcaccataaagaagtatgtcaatggcagagcaagaagcaaaactcaggtctcttgtctctgaattcagggatttccaaaacatactgtgttttcttttatttatttatttttatttattatactttaagttttagggtacatgtgcacaacgtgcaggttagctacatatgtatacatgtgccatgttggtgtgctgcacccagtaactcgtcatttaacattaggtatatctcctaatgctatccctccccgctccccccaccccacaacaggccctggtgtgtgatgttccccttcctgtgtccatgtgttctcatggttcaatttccacctatgagtgagaacatgcagtgtttggttttttgtccttgcgatagtttgctgagaatgatggtttccagtttcatccacgtccctacaaaggacatgactgtgttttcttctctacgccacggtacagcagaagagctaagcactaaccagaatctggctctgtctccaaggcagtatcaatatttccttgcttttcccctctccccttaaagtcatatcacttagctaaattaaaagaggaagctcataagtagaatagaatgttcacaaaaactaaacccatctagaaggaaagaatgagggtggaaagggggctctcgtctgacccgattaagaaataagtatagggtacactaaagaatcaaaacatatcacctcagtgaacaaacctttgatcgtttattcattcaacaatattcactgagcatctacattgtgacagacactgttttaggaactggaaagaggtaacaaataagacaaagtcgtttcccacaagtagagtatattctagttcgggaggcagaaataaacaactacatgaacagtagaatttctgagagtgataagtaattggaagtaaataaatgttatgctgggatacaggataactgctgggagagggtctcctttggaagagatgatcaggaaggcttttcaaaggcggtaacattttatttggagtctacaaagggaaggaacttgccatgctaagcactaaggaaatataccagaggccaagggaacaacaaatgctaaggttcaggggcaataagaatttgaaggaagtggagaagaaaatcaaggcaaaggaaacagctcaaggaaaagcaaaataataaaataataaaatttttactttttttaaaataacaaaagtttaaaagcatgaaactacatggcatgtttggaaacaaataattcaaatatatgcatgggaatgaggtcagaaaccaaggctgggaggctataaagaacatctgaaattctagattttattcttcagacaatgggaaatcaagagaaatgttgaaatggatgaatgcaggaaatgcactgaagtgtaaagaggcagggagttcagacaaaaaacattgccagccaggcgcggtggctcacgcctgtaatcccagcactttgggagtccaaggcgggtggatcacaaggtcaggagttcgagactagcctggccaacatagtgaaaccccgtctctactaaaaatacaaaaattagctgggcgtggtggcaggtgcctgtaatagcagctacctgggaggctgaggcaggagaatcgtttgaaccagggaggcaggggttgcagtgagccaagatcatgccattgcactccagcctgggcgacagggtaagactccatctcaaaaaaaaaaatgccatggtccgtttaatattggaggcagaatcagcatagtggtattggtcatggaaaggaatagagagaattaagagacagtcagaggtggaagcataatgtatgaagtgaccaattagatataggagttgagagagggaaggagtcagaaaactttacgggtttccaaattgggcaatgggggaatggaagtacctatagccaacatcttggggagcaactgtgtgagatgagttcaggtgaggttgtacctggaggtcagacatcttggaatattagagaggggtgtctagccaactattcagagttgaagtctagtcttgagaaggaagaggtaaagatgtagatttggaagtcctcggcatataaaggggagttgaatccatgggggtgaatgatgttaactcagaagatgaaaggggcttgaggaaacagacagctgagaagaggctatgaaagatatgcagaagagaactttaggggatgatttcatttaaatggagagacgacaaaaaagaaccatcaaaggatgctaaaggtgggtacagagtggtagtggggaaagtgattgaatgagagaagcagcaaggaatcaagaatgtcaaaaatattgtcaagaggagaggagaccgtagttggaattgtgtaattattatttctgtggaccaagtaaatcttattcaggaagatagttagagctacattgctattctggaaataagtataaattgtgctagtcaaagcgcatagttttatgctccaataaaatctttgccagctgtcaaataccagtcactttaaaacataataaagacctatttcacagtgagaagtattccttttccccccagactccatgcaaattatggataaagaatgtagcaatttaataaatcactgtacttttgaacttagccataagaagaaactaccagaagtgtgatttagaagaaaaactataaaaaatattctacttattgttgaactgaatcaaggcttttatggaaataaatgtgatggtagtttatcaaaaagagggtacttgaaacagaatagaaataaaacagaataaagtagtgttatttcacttctaaacattgtcacttgaatagaccattgtctatggatttttaattgtaagttgcaatttgagttcaatcaaaattaatacctatcacaagaatgatttcatttttgtctcctctgtataattaccaaattgatataatatcttgcatagagcattatcacgaaggtcagaccatcttctttcaaaacactttgttttccttggaatctctctatatcaaccacctcagagaatctctggtaatgtcattacagagaaatagaaaataaagtctgccatgttattaacatgccattattttgcaaaagagaaaagtttaatagaaatttaaataaaagaaataggtggggatgggaagaaaaaccatatcaaaatgtgaaaatcaagtaagacaacttgttcaaattccaacagtccacaacataccacattatacctgtcttataaattttcccctaagcgtggaatagaaaattaaattaccacatttctgtgatttaagatctttggatttgatttgaatagctgtatttctgaagttgcttcattacattttttcctatggaggtaaagtttttattttcagaattattcacaccatatttttagtcccctaagatcttaaaatgcaaacagtggttgctgactttattaaaacataagaaaagttaggtaatatttatgatactgttgatcacctacccaacaatatttcttccctctttcctttcagagtgttgattttatttaggcattcactctcccctcttcactggggaaatcccgattagcctaagccattcttgggcatgtcattgcccaggaaaccaacaccaggatgaacctatgacctaagttgacccaatcagattggaaagaagggcttatagtttcttccttttctttcttttttcctttctttctctcttttcttcctcccttccttccttccttcctccctccctcccttccttcttttctgtctttctttcctgctggacatgaacaaggaagcatgaagtcccagctgtcacagacagtcatcttgctcccatgaggggaacccactttagaattaaaaatggcaaagcagaaatatagaaataaactaaattcttgaggactccattaagctattgttcattccacctgaaacccactttaccctttagactaccagaaataaaagaaaataaataacattatttattttcatttgagttgaggtttagccttcttaagacataaaccagattatcctgagataaaagaccacagcatttatttcccagtcttgaagggatgaagtgaaaaaatcagcagaaaccagcagatggccaagaaagtgatccctagataccctcattgctcattagcctaagatactcccacgagtgccatgacagtttacaaatgccaggcaattacctgggagttactgaccctttctgtggcattgacccaaaagttactgttcctttcctagaaagttctgaatcacccacccctcaatttgcattaaccctccccttaatttgcatgtaattgaaagtgggtgtgattataaagagagatgccaagagtccatacattgccaactctcggcacacttcatgtgagttagccctgctccacaaggagcagtactggtcactaaaggatgtctaacaccactggctcatccttaaaaatatttcctgggtgaaggctaaaaccctccaaggctaaatcccaattctgggacttgcctgtcctgcatcaatattgcttgtttaacattctccaatgtcttccaccatactcagaagaaaacccaaactgcttactctggataacaaagccctgcaagatctctcccttcaaactccttgaacccatgaccacccactctctccttcatgcactagactccaactaaactggtccagctccttgttcccaatttaaggatccttgtcctagctattcaacccaactggaaggctcatccttctaatacttttatgactaatgtcttcttttcattccgatctttttttaaaaggaaacaacctcacagggacctccctcaagcacccatattaaaatcgcttctcagtcaattgcgtatcacttctgcacaacatttcttaacatccgacaagtttcttgtttgtttacagtctcagctgcccacaagaataaataaatgaaagcattgctgcttccacagaaatcttggacccctgatacaagcactgatttgtgtttagttcattggactataaagagttttgaaatctcaattgtcacctggactaggtctaatgcatgcactagcaacaaaaccagatattattgagaaattatgtaagcctaaatgatcatgaaaaatgtatctggctctatgattagcaaaagaaaaaactgtaaactatctttttatcccttgaagtcattagctttaagtcaaaaagactaatgaaataaaacaacttcaaacgctaacctatatgcaaactgtgtttaccaactggaattattgttgaccaatggtatttgaaagtcactaacaaaaatgatgtgacaattgtcaaatgagcagaaagtacagcaaccatgaagaggaagatctgataaaactctgagaaaacatgtggatttgagtcacagaacattgcactggtctcactgtcttcttgaaggccgatcagaacaggttcgtacaatgaaagagcatttagtaagttatggatcgtgggccatatccttataggccattaatttgttaatttcaaaaacagcacagtgttttgtgcaactaagtatactgtctgcctgcacagagtctaaaaaatgttgaagtctactaacagctttcatggttatctccagcattttctttctttctctgcttagttactcactttggaagggaaggatactgaaggataacctctgacaagtagtatctttttttggtggtagaaaggcacaaaagttagagatccataaagctattttttcaccagcactctaagtcaaggaaagcataagaattgtttctgagcagatgttctctcccgtggaacttgccaggacagagtttctactgtctcgaaaaaaataaaacacacattttaatgtatttctcttaacgtctcattttcagtgctgtccaaacaaaaacctggctacaggttcagacttactgaaacaagtcaatgaaatctgcttggaattcatagttttagcataaagcacccaattttagaaaagtggttctgcacattaggttaatacattaagttagttgttttctgcaatagggttattgtagatacctaaaaacagaggtttggcagcctagaattccttatgccaaggatacaaaatgctggatataaaatccaatttccacctgcttacttgaatatctattttgaccaggtatgtaaaagacatgtacttgctgaaaatgttgtcttttacgctcaccactcacttcatgctgcttaaatatccatctttaatgaactcacctggaaactaattcactttgaaagcaaatatttaccaaaaaaatctgaggccaatagatgggtattatagaaaaaattacatgtgttctcaaagcacattttgagcctaatatacctttaaaatacccctctttttctattaaaatattatgacaaaatgttctactgttggaaaatacccaagtcccctcctctatttgtctattctatttttcactaatttcaatgaatacaataagttttttattttgaatttgttttgaacaaactagtatagggcaaaaaatgaacaaatgaaaactatgtggttagctgcctgaggtaattgcttgtaaatgtgatagtgtctaactgcataaaaatttgctataaataagaaaaaaataaatctgactctaagtagttttaaaaatccatttgaattcatcaaggagaataggaaatacattttcttttccaaatccatctcaattgaattaaaaactctttgagggcaggaagcagctcagactggtgggtaaaaccttggaaatttgaaataagacaactcaggatagtagcccaggtatttaaaccactgtgtgacctctgccaggtttcttattctctctaggcttgaatttcccaactgtaagataaggataataatatctacttcataggattgtggtgtgaattaaagatctgagcatctgactcatggtacgctccaagtcagtactagctctctgatatttcccaaaacacacagctcaggtatttacatactggatactcaatgactgtttcctaaatgaaataaaattaaatgttatttccactctataaaatatctgcatttatataagaaataattacaattaataggacttttggcaacttttgattcttataacttgagattgcttctactttctcatttgtacatatcctatcttactcctagccccaaaccaaaatgtaaaatttgtgcacgattagaatctatttaaatgtatgaaaagtcatactttaaatatccaactgagttttgtcaggaaaataaagtcaaaatcaacattatgagaaaaatgaattaaatatacaaattcaggctacacaaatagaggatgcagcaatgaaggtttagaagatgatggccgaggtatctcttaactagggggggaagccatttatctctagaaagttcaagaaactgacacaacccaagaagtggaccttgtggaaaattctagaaaccacatcctttgccacaacctatagaaaacacggtctggggaagtccaaaaaagtaccacaaccactaacggcttgtggagaggtctaaaaaccagctgcacctaacaatcaggacagtcccaggataacagcttccacttcatttgcaacttccaaatcccactcaaatccctcttgtgggtgaattctaacccagcaccacttaggaataagaacatagggaaatacagtcctcagccttagacagggctcttggtggtggtgccacattgaaaacaaccaacctagcacagtccatgcaatacccttgttaactcattgactcaacatccatcctactactaaaaccatctttaatttccaaataaagacaatgacaacatcaggcctccacctaaactaatgcaacctatcatttacacgaccaaagacatactaatcatctgcctcacaaaggaggcaaagagtccacatgccactgttaattctttctaaatacaaagcaagataagcccatcaaccaaaggcaatatagtacaaggacttaagtgtcagaaagaccaagggtcaaatcttagctcttttacttgaccattgtgtaactttgataaattacataactctctgatccttcatttcttcaagagaaaaatgaaaaacacctaccttctaagactactgtaaacatttacaataatatttgtgacaattctgtttcatagtaagtgctcaacaagtaattagcctttatcaatatctattttaagtggcatggatagagtaacatttcttgctgatcattttttgtcatgcagcatattacattcatgttttctcaacattatattaaacggttttcatacacaactatgtatgtttttctattgtaaaaacttcctaaaacaaacatcagctgaaatttcctaatttaaatgaccaatttcttgatcctgcttaggttaaacagatctgcataaagatacagaaaagtgattgaacagtcaagaggtagcagcaaaccctaagaaaaaggaaggtcaaagaactgaattatatacaagttacctgatcagctcctaaataatagaaaatttactgtttatccaaaaggacagcagtcctatttacctaaattatgccaagagtgacttcagagaggaattagctttcacttctacaaagatctaacccatgagtttgtaactttaatattctgacttcatgtcaaaggagaaaaatctcaactcaattatcctaccagaaaacacaaattggttgacattggcagactacaacaacaccatgaaaattgtaactgcagagaaaagacaaaacaaaaaaacctctggaagtcagaacacttgagattcatatcctcataacttggaaggttattcttttgtttggacaaagaatactggagttttttaaatgtttgtacttcaactcatccatacttatgatataatccccaaaaagcagccagcaacccaaacctttaaggctgccaaccaggaaaaataacttagcacaacaatgatcttttctaaccataaataatggtatcttgggccaagcttcctagatagacttggattgaaacagctctttaccctagggctattaactgtataacatggatattgagaggaaaaaggcaaaaagaaaaaatgcaaaggaataaaattaattcttaaaatacctcaaattttgaataaatggggacatggacttcttgaatggtagttctgtgaattaagacaagccatttcttggtatgtgtgcagaaatcctagaagttgtgggatgcttgaaattatgtttatgactccaaaactcaagtgtgcatgtcaaatataggttgtagggacagatctcaactaatctctgtatggtatttggctctaacaccaaaataataggacctaaaagagaaacaacattaaagtcctaccatccaaaacccaaacaattttgtaactaggatactaataaaagaataactggagcctctagagttccagtagctcagtttggttagaggctacttcaaaggatattaaaaatgcccgaaaccaatagagtgggaaagttggcttgagggccctaagaaaatgcatagaacagaattctgattcagtggggctcctgatgaggtagcagaggaataaatacaacccacttcaagttaagatgaagcctaggtgcccattttaaattgccctaaaatagagctgaaaggtcttctgcctgtgcaattgccatgttgaagacctttgttctgcctgcaggaggttgtaatctggtcctgctattctgactccttttgactaaaaacaaatgacatgtaaacaaatacagcttccatgttacactggcatgattttaatgtcatatttaccaatctcatatgagctatttgcctaagattcaattagactttaagaaatcgtattatatcgttgacttgtcccaagctcatgactgacaaaaaacctcttgtccttttcatgtaaattaatgttaaggcacatcttgtctgctgcatatgctgaatctttagattcattgtagcactttacgttaattgctattacatttcatcttgttaaacctggtcacttattttacctgcgtctgatctcgattctgccctccaatatattagctaaagttccaaagtccatgttaactatttgtttcctatggccaccaacagtgttgagtaggtataatctcaaacatttgctgcatgtaaccagctacttcctgactgtcaaaaatattgattgcttttcttagatacaaactatcagtcaaaactttacaaattctcctgaatacattatcatcctgacatttttctttttgtccacaaagatattctctccatatctgtctgataaactagtttctgatatacattttcctaatcaatcagcctagaagctttattcaataaagaaatttggaaaatttgaaaagccttgttctacatgatttaataataacccactgcaagcgcttcagctttctcaaagagttcaaaagataccttctaattaacctgttagagcattttgttccaaatggacaatcaagttcctcaatctgtatcaaaatatttttatcagttcagaattttgataaccattttagcagcatttgcccatttctcatttttcagcacctttatcttcatcccaggcattttaaaagtgccaaaagaagtgaagaagctcattgccacattttctgttcaagaggaaaggtagaaaccaaagagaactatttgagtatgaaattcccttccatattcatataccctggactcaacattgcaatataatgaaaaattaaaatgggttagacttgaagatttggggtatacttctaacaaaagagaaataggtaatgagacatctcatgcttagcccaaaggataccattattttccacaatccactaaccaaatatctccatatcagataaggtaagtcctctaacctagttattcatcttcagtattgcctgggctatctttggtctcttgcctttcacacaaattttagaattatcctaacaatatagttacacatacatatgtgcaagcacataaaaaagtgctagaatttttattgggatggcactgaacctaaatcaatttggggagaattgaaatactgaagagattatagctttctatttattagatcctttttaaatttttctcaataatgtgttgtagttttctgtatagaggttttgcacaacttttaatagacttattcctggtattcagtatttttatattattgttcatggtattatttttaacttttaatctttcatttgtttttttctagagtgtaaaataaaactgatcaagctgaaatacaatgactttgctaaactcacaaatcaattctcataatttatcacttaatttttggatttttctacctaaaacttaatatcatctgtgaataattataattttgttaatctttatagtttttacttctttttattgccttctggaaatgataaaaaaacttccactaacatgttgaacagtaaattgggcaagctttacttgttcctaatctcaaaggcaaagttcttactattttacttttacataaaatgttagctggaggatttggggtaactcttctttatcagattgtgaattttttctatataaactatctatactaagaatttttaatcataaattttctcaaattattttatatatttataatatttttatcttttgttttttaatgtgatggactacattggtttatgatcaaattttaaactaatctcgcattcctagaacataaaaaaacttaattgtggtgtaatatattgttatatttggttagtgattattttgtttaggagttttggaccattgttaatatgtgagattgtcctgtaatttttcttcctttgtctggttttaaaatcaaagtttggagaacatcataaaatgagatggctgattgttcccctattactattttttggaagaatttgtaaatgatggccattaagcctttttaaaaaatgggacagaactcaatagtgaagctatgtgagcctgaagttatctttgaacgaagtattcaaatatgaaccaattgtttaatacttaaagaaccacttacatactctacttttttaaggccagtttggtaaatttttttctagaaataggtccatttcttctaaatttccaagtttattggacttgggttgttaaaaatatcttacctttctcatctctatcagttctatggttatttactgacattatttgtgccttctctattttttcctcatcattcttcccaggagcttaccaactttattaatccttcaaaataactaattactggctttgtattttcttctatctttgatgtctaattaatttatggtatctttctgattttctaaagtttctgccatcttcgtatttcactttttgttctttttctaacttcttgagctggacacataaatttctaattgcaccttcatcttttctcaaatatttagttaaggctctaaatgttcctctaaggactactttatttataactactttatttatgcaatatttcactataattttatcatatcattaatttttaaatatatgggattttaacagcactgtgatcagagaaactatatttttcaattttgtgattatgctaatgactaaaagtgctaggttttgctgtctctgtcttaacatcagcaatgaaaataacatatatatgtatgcaaatatatatatatatatgttctcttttcttgaggaagctcatgctgagtctcttgtatttcatttcctggttctaatgaagttcttttactcatatttcccctccaccttaagaactcttcattcctctagcccagcactctctgatggaactttacgtgatgacagaaacgttctgtatctccactgtccaatacagtagccagtagccacgtgtggctattgagtgcttgaaatgtgactagtgtaactgagaaacagtttttatattttatttatgtttaattaactaaatttacatctaagtaaccaaagtgagtagaagctaccacattgaacagcacaagtggaatcatcccattctctctctgttagttaggatgtagtcaggaagaagttatttgaacagagagaaagtaccataaataattgttaactaagtatacattttgttaattagagaaaaagagagactctaaggcatcacagaagtggcaactgggtgaagcaactgtcatctctagagctgagggaaggaaataaacaatctgaaatattaaacttagaagcttggggaagaggcccatgaagcaggagcagatctctgaaagggaaatgagggtgggcgggagagggtcacgctgatacgtgtaaactgtacactacaagctgtattcagcttgtcacatcctgaaagaattgctgctgccaagctgaaggaatgttgctgatgccccactgatagacttttgctctcacaggaaccaactggaaggagcaggtttgtcatctgcctccagtcatgcagcctccctctttccccctccgctggctgagtctaacaggaagcatttcacaaagcaaaaaggtggctttcagagtccaggtccaggcaccatgaagccaatcacagaagggtgtgttcaaagttaagaacccaaaaccaactaatatggtttggctgtgtccccacccaaatctcatcttgaattgtagttcctataattctcgtgtgtcgtgggagggacccagtgggaggtaattggatcgtggagatggttactcccatgctgctgttctcgtaatagtgagtgacttcttatgagatctgatgattttataaggggcttttccctctttttctctgcacttctccttcttgccatcatgtgaagaaggacgtgcttgctacccttccaccatgactgtaagtttcctgaggcctccccagccttgcagaactgtgagtcaattaaacttctttcctttataaattacccagtctcaggtatgtctttattagcaacatgagaacagactgatacaccgacatactctcttatctgtttctccattctcccctcctcttgctttccccaagcccaatcttaactgctccctaagagaaaaagcatacctctgagaaccttccagcacctccagcactgatccagtttcttagatctttgtttcaacttcagtgggagataaaggagagaaataatctctcaatggagagtgaaaaaacgagaagagaatacacaaagaataatctgatgtaaagatataactctaccatgctgttttcatattttgataaagacgctggaagaaagacataatttcctactaaaagagaaatgagaaagtgcaatgataagtgtagtgaagtcacagaaacaagtagggactgtggaggacacatgcctgtctaaagagggcagcagccatccagccagcctgggactgcagtgcggtaatgtgagcccagtgttcccagatctcctaattttttgagagatgccagaaatctggatttttatgtgaaagcatccaatttcataatgttggctcaggaaagttttaaacattgtaccagccaaatgaaacactgcgatgggccaaatccagcctgtgggccatggtttgggacttctgcagtgcagcatgtggacaaaaggggctctgcagcaatgatatatggacctcaactatcccatcacatggcccatcggcaagaacagactagttcaacattaggtgccaactttaattttaatgcaatgttggttacttgggatgggtttctttttgttgctgtttctgttgtttctctctgtcttttttgttattgtcattgatgacgttaggacaaagtccgtctaacctagcactgtcagccactaccatgatcactcacttcaatgtggagttaatttaaaatgaacactttggaggaaataaattgtataaatgaaacatataatcattattctgagggtttggcatttacttcaagagagcgggcatctctttagtttgtaagagcaagagtccatcagcgggacatgtagttgaatatgcaaactgaaggcaaattgaaatagactaacaccgatgtatatacatacatacgcattgtacatatagtatgctcatatataaagcttcattgtctttggcaaaaacttttttacagctctattacaaaacaataaagtatattgcaaaataaaacgtgtagacattaaaactggaattagttttatatgtgtttacatttgtcaaatcttttagtaagttctttgatgcttgattctttcatttgtttgagtataagaaaatcttttacccatatggaagctttacacatattcctaagccacatggaatagacactttgacttgtatgcaaaagatttgtggtctttgcaaagccattataatttctcttttggtacaattgaaaccataaataaatatatgtacatgcattgtataaattgtgtcatatgtttctgggtatcttacttgctcttattctagaaaaataaatcactacataggcccacactttgaaggagcagtggattttatcaaatacaatatttctctttcttctttctctaccttcacccaactcaaattagcactttacttacactaccatcaaccatctgtactacagtttattcttataaaatagggatagtgcagagtattgaaagcatgactttttcctcctaaaactttgccttttaaaaaatatatatatattgtaagctaaagagaaaagataatcactctactagaattctagcagactataccttcaggtccttctctatgtgcactacatttgaaataattcctgcatgcttcagtctctaataataattatttcacaggttgaaatgctcagaaaggaaaataaattagacctttagattacagtagcattactatatgattaataaatgctagtttttgatactcaagaggggtagattttgttcagaagattactttggttttaaaaattaatatttattataagttaaaagtttgtaagactaattcactcctaagcttttcaattcaacatacaaatcttactccatttatagctccagttacttttaaagaggcttataggccaggcacagtggctcacgcctataatcccaacactttgggaggccaaggcaggtagatcgcttgagcctaggagttcagcaccagcttgggcaacatggtaagtcctcatttctactaaacataaaaaaaaaaaaaattagccaggagtggcggcatgcacctatgggtctcagctactcaggatgtcttgagtctgggaggttgaggctgtggtgagacgtcgcgatctcatcactgcactccagcctgggtgacagagagagaccctattccaaaagtaaataaatctaaaaaagattaatttataaacacatttgaaaacttatttatatttctttttttttttttttttttttttactttttaattttcttttttttttttttaatttttttttttttttattatagtctaagttttagggtacatcacactctggggactgtggtggggtcgggggaggggggagggatagcattgggagatatacctaatgctagatgacacgttagtgggtgcagcgcaccaacatggcacatgtatacatatgtaactaacatggcaatcattaaaaagtcaggcaacaacaggtgctggagaggatgtggagaaataggaacacttttacactgttggtgggactgtaaactagttcaaccattgtggaagtcggtgtggcgattcctcagggatctagaactagaaataccatttgacccagccatcccattactgggtatatacccaaaggactataaatcatgttgctataaagacacatgcacacgtatgtttattgcggcactattcacaatagcaaagacttggaaccaacccaaatgtccaacaatgatagactggattatatttctttaaatattttaagttgcatttatatatttgggtacttcattgtccattttttaaaaaaaatagccttgccaactgcttatgtaattcttctctataaaataaacttataaatctgagggacatcaatttctcttacattttctaatattattaataaacttctgtcttgaccttaaaatcacaattctaaattgattatgcatgatgcatattttaaattagaatctatttctaacattgcaaatggtcctcaacttaggacctacgttgttccctcatgtccctggacttttgagtttgtttccatttgtctcagctttgaaaggaagcagattggaaggaaggaagatttcttcttactctgtctcccatttatcttttcttcggtatttaggaaaatgtgtgactttggtgagaaatttacagaatttattttctcatttaatcattagattccctttgcagtatacatttaagattctttaaagtagttgtctgttcaatttttactatacacttaatactagaaaaggagtttaggttgctaatacatgcctttggagaatccaacatgcaaacaagaaaatatacacttctggcaatgtggtcttcttcagtttggcagataaatagacttagcactttcagaatatcaaactagtttcacaccatgttgaagagagacatgaatgattagatgattagatctactactggaaacagttaagaatctgtcctccacttaatcattaataacagaggagggcaggttttcctatagatttgtaatatatttgcctagattggagcaaaaggtagaagggtaataaatagcttagcagcttttttggaattagatatctcttgatatatataaatcctgtttaaccactcatctaaccataatgtgttctgaggaaagactagaaaatatagtcgttagttctcatctggtcacttggacttactatacaaaagacagagaaattcatttcagagatttctatattatgggaacaaatagaaaaaactagttgttatgcagtaatctgaaagtattttttcttcaaagaaacagaagtcatgaggtatggagcccaggacaacagaatttggaatcataaaactatggctcaaatgttggttctatcacctagctatgcaactttgtaaagacctaatcatcttgttcgtaaaggaagataataattttcctgtagacttgttattagaaataaagataatatatataaaatgtctcagagtaggtcctgatgaaatatatgctcttattttacataatttttaaattgctatttctccctgtgcgagctgtatctcattgtcatgaactcatggaatatataaacatgtgttgttttgacagatttttattccaatgatgtgctttgctaaaaagtatataatccaccatcaggtttctgggttaaagtgaaatgagaagccataatttgtgtttctttgatgaaagaattagaatatgggaaaaaagtattctaaaccaaaactatgagaatgggggaaagagagaataaagaagcaaatattgcagcagattgtccttcactctcaagaatgtgtcgaatacacattttgcttctgaaatctggaatctttctgctctaggtggaaatcagactgcttttctaggagtatttatgttgtttcatgatgtgattatttcacattgcatcattgcatgcctctatcaaaacatctcatgtaactcataaaatatacacctactatgcacctacagaagttaaaaataaaaagttacaaaagtaaaagagggtgaaattcatttaaaaacactattctagaggcaacaacagaggggtcaaggaaacaagttctgaaatccatcttctcattggtatggcctcctagctgtgggatctgagttacgaatgtgtgatcctttgtgatccttcaagtaaggttaataataatcactacctcatagagttgttgggagtattaaatgaattaatacatggaaagtgttcaggatggcacctggcatatactaatatttattaagtattcattgttattactgctaatcaacccaacagcaaacgagaaaaaactcgtactctgtctgggaaacacagaagtcctttgggggaaaatttagtatcaagaacaatcctgagagtgttctaggtcctggtcaaatctcgttataagccaattttcccccttttcagcattttcaaccaggttaagtcaaattagaacaaacattaaagataaccttaaataaggcactaaaggcatcttgaaatctaacagaaatgtggaaaaaggaatttagagtaccatattttatcccagttttgctgtgctgttattggatgtatctttcagcttttgctgcaataatgctgcataagaagcaataccaaaatctcattgacttataacaactgaaatttgtttgtcacacatggatctgtgaggtagccatggtgactatgctccaggctatatatctggttcctgttcctcagtctaagacttataacatcgctcaaaggctgatgcagctgtagccacctaaagaagtttttatcatggcagagggaaggaacacaagagaaaaaaagcaacgacataaacaaattgaaaaccttatttgaacaggaagtaggtcacttctgctcacatttcattgaccaaaataaatcacatgaccaggtccaatagctatgtaacaaggaagtacatgcctcctgtgctggtatggtcgagggcagtatttgctgaacaataatacaatcaatcacacttgccaaactaccagggttccatccatcaaattcaagacatatactgaccacttcaattaaccgtgtattagtgatataggtctcaaatgttgaagagcatcaaaatcacctggggaaattgttaaaaagtataaatgacctggccttcccacagtgattctaatgtaatgcatttgaggatgggacctaggatctgtattgttaccaatctcatcaataatcccatcatacaccaaagtttgagaatcactggtttgcagaaagctatgcctagagattaggacaagtcactattcagagcaggtgcctactttttgacttgctgtcccagggaagaagggaagatgacacaacaacattcccacttgtagaaagaagagaataaactgggctgggtgcagtggttcatgcctgtaatccagcactttgggaggccaaggtgggccaatcacttgaggtcaggagtttgagaccatcctggtcaacatggtgaaaccctgtctttaccaaaaatacaaaaattagccagatgtggtggtacacatatgtaatcctagcaactcgggagggtgaagcaggaaaatctcttgaacccaagaggcgggggctgcagtgagccgagatcacaccactgcacttcagcctgggtgacagagtgagactcaaaaaaggaagagaataaactgaagtttctgatggattggatgttggctcccaattatttcccctctgtgttttcatatctttgccatttgactttgcagttcctcccactgtttccctaccttgtggttagacttaaccatgtgactcacttggccagtgagatgtgggcgaagtaacagagtgccagttccaagcttaaaccgtgttcctgcttaccctcttgatctgtaccttgagaacagcttttcctggtagctgctgccagtccagacaggaccccagagttacacattgaccagcctaagcccaagcaagaagccaagcccagctggacccaacttgaatcagagctttttagccaagagcagttagatcaatccatctccatatgaaatccatacacatgaaagaaaaactgattgcaattttgagccaatggatttgggggtgacttgtcactcagcaaaagctaactcataacctctccccagttttagcattatttgggtagcaggagtgggaactcatgctccctacattgaaaaggggctcagactttaagcaaaataattttcctaattttatgaaacattaaggatatatactactaggaagtattctcatctgaattcacagtgtgtcatttatttgaatatacctgaagaacgaagcatatgaatgtagaagagtgaaataagagaaaataggaatatttaggtcatataacagcatcattttttttttcaaaatagaaacagattgttgtacagaatccagcaatcctggtggaaatactctgcaatggaagcatgttttccattaacttaaatattgtgttaacctcaatcaaaaatatactttcttaaactaaatacagaatttatagttttgagaaacagagcctacagtctaaatgggcaaaggaactgatgcaaatgactctgtcccacatgattaaaaatattcttagttttattttgtaaaaatgaaattaaaacctaaaatagaatttattctgtcactcaaccaaacatttagccatgtgtggtatcttttacatctccagagtccattttcttttctcattgctgtgtactgtcttgaggccataaggacacggtttctctctattcaataaaactactcaagaaaaacttctcacacacagacagcctctatcatctcaagactcttggaggctgacattgcaaggcagatctttctactaagctagtgaatctgagaagtattgtcagagctctgtcctgttagaaagtgtattagtccgttttcacactgctacaaagaacttccctgagactgggtaatttataaagcaaagaggtttaattgactcacagttccacatggctggggaggcctcaggaaacttacagttgtggcggaaggctaaggaggcatgtcttacatggcagcaggcaagagagagcatgtgaaaaaggaactgtcgaatgcttataaaactgtcagatcttggtgtgaactctctcactattacaagacagcatgggaggaaccaccctcatgatccaatcacctcccaccaagtccttccttcgacacatggggattatggggattacaatttgagatgagatttggttggggacacagagtcaaactatatcaaagaaagtgatgcaacaggtaatatattgtatatctgagttgcactctgggcttttgggcttaatgggagtgtcttgctatgaagaagaaagatgtatggaacaaggaggggcaagagccttcacgggaggctcaggcctcagagactgcagccagctttggatcttgcctgtgatccatgtatttctcctgtacttcatctttgccttttgagggaccaaacaaatgtggaaacttaatcacgtcttcgaaagaaagtgagaacaggcagtggtgggagagaagcagtgcactgttggaagaaagagtaaaggtccaaataaatcctgtctgaaaacccaaggtaataaagtgggccctaatcatgagaggaagatttcaggttaacgctaccatgcatcctccttttgcaggcaacctcttcctctggctgctagaaaaggaagaatcctcttcatatatccagccttagaggtgagcaaagaccaactctgtattcatttgacatgaaatcaaacatttctgggactagaagaagtgatttcccagcccagaagactatgatgataaatacaacctggattactgcagtgtggtaggagtggggtgggcaaataacctggtgtttataacgtgtttagaagactcagagtgcttgatgctaattcccaagaagctgagtttcgtatagcaatgccagggatatcatcattccataaatctcgtttacacccttagtcactaggaagcttggcttttttattacatctgacggttgcttccacaatcataaacatgatcctctgaatcatttccactctttgaaaatgttagttttaatgtcacacgtaaattctgccatagcactaatattcacaatttaatttgcaaaacctttaatccaatatatggtctcccctatcatttcgctggaaaacagaaaattgtgaaattctgtgacttattcactctacagtggagcagaacaactcaagacccatcaatcacatgaccagtcataggcaagtttaaagtacacgttgtttttcaatcaccagagcacattagatagtaggctcttttgcaaagcaaactcccaaaaaaagaaacataggcttaaatagttatcattctcattaaacatttgtctagttctctcttcacttgaaacagatgttaaatcatttggaacttccctttgctgagtcctgtcctccacagaggcttgttctctgtctctttctcaccctctgtcttcctcaggttaacaactgccccaagtaccaatctataagggatactgcctatcactgggtgttaaatttccactggaaatttaagatgtagaaaatggtattgaccataatattttccaaggagaggactgcatatgtttacaaagagagctttaagtcatttgtagccaaaaagactcttgaggtgaatcctagaattgcaaataaatgtttgctcctctgccctgtcagaaatgtgcaaggctcctgtttggtagaaaagaacatgcaagttttggggcctgagctgaatttctccattaatagagaagaaagcgggctctccaggaggtggtctttctcctcttgttccccaaccagtgtacacccctcctttaaattaaatgtagagagaatatttaaagacaatggtttaaggtggtgctgtattagtaggctatccaagacacttgtatgactcaaagcaaccaaatgccctgctctttttctcttcttgacgctgctctctctttccatttttcttgacttgttttaatttaaaaattaaaaatgtaattcttccctcacagatgtgagctaagtctcagctcttccttttatctcccaactcctgattcaactaagcaaacaaaaaataccttccttttctattcttccttctacatgataaacgcaaaaagaaggaaggcagagagagagagaaagaaaaaaaataaaaaaagagagaaagaaaaagaaagagaaagaaagaaagaaagaaagaaagagaaaggagagagggagggaggaaggaaagaaagaaaagagaagagagagaaagagagagggaggaaggaagaaagaaaggaaggaagcaaagaaggaaggagggaaggaaagaaaaagaggaaggaaggaaggaagggagggagagagggaggggaagggagagaaagaaaaacagaaagaagaaaggatgaaagggggaagaaagaaagattgtctagaaaaatgcatgatagtgttttagcaatcattcaaatgaatcattcataactgttttctccaatcagaaatttgtctgattcagaaaatttagaagtatttaaagaaaagaaatttgtctgacactacttctctttacattgctgaaagtggatttaaatctactttctcactccaaaaataaacttcagataaatttatattctcagcaacattccaaactcaaacacttagctcacatataacccacatatatggtcatatgaatatatgacttgaaaaagctacataagtgaaaaatgcataaaatgaatagtttctcttgcattataatcaacaatgtccttcaaggtttgaggacaaaacattcgttaaaattaaccactcagataactcagatggtagtgtcagatttaaatctactttctcactccaaaaataaacttcagataaatttatattctcagcaacattccaaactcaaacacttagctcacatataacccacatatatggtcatatgaatatatgacttgaaaaagctacataagtgaaaaatgcataaaatgaatagtttctcttgcattataatcaacaatgtccttcaaggtttgaggacaaaacattcgttaaaattaaccactcagataactcagatggtagtgtcagaggcatttgaaccagagcaactccatcttaaatagaagctgggtaaaatgaggctgaaacctactgggctgcattccctgagggttaaggcattctaagtcacaggatgagatacgaagtcagcaaaagatacaggtcacaaagaccttgctgataaaacacgctgcagtaaagaagccggccaaaacccactaaaagcaagatggcgacaagagtaatctctggtcatcctcattgctacactcccattagcgccatgacagtttacagatgccatggcaacatcaggaagttaccccatatggtctaaaaaggggaggcatgaataatccactccttgtttagcatatcatcaagaaataaccataaaaaattggcaaccagcagccctcaggactgctctatggagtagccattcttttatacctttactttcctaatacacttgctttcactttatagacttgtcctgaattctttctcgctcaagatccaagaaccctgtcttggagtctggatctggacccccttctggtaacagcagccccagtcaaagactctcaaaagcataactcattcagaggtaggcagacagaatgagactcccagggagcttgtcctgcttctctggagttaaatggaaggctcacttcatgatctcactccttgattgcccaactgcattaattttttctggttttagttctttttgtctccagatctgagcactcaccttgagaactctttgctagacccagtatgttagtccattcctgctgctgtcacaaaatatcttagactgggtaaatcataaaaaatttatttctcacagttctggaaactgggaagtcccaggtcaaggtggtggcaagttcagtatatagtggaggccctgtttctcacagatggtgctttctctgtgtcctcacatggccaaaaaggcaaggcagctcgcttcaacctcttttataagagcattaatcccacccatgaaagtggagtcctcatgacttaatcacttcccaaaaggccccaccctttaatactattgaattgggagttaggtttcaacatatgaattctgggggcacatcaacatttagatcatagcacccagtaactaaatgattcattagctacctaaggacctacgggctaaaacacattggtaaattatagtaaacttatgcttactgtgtgattttagcacatttaccaagtgcttccaaacaactggcttatttgtccatgtcttcctcatacaagatagaacaagtaaacttattcctcttttatgtacaatgattacggaagtgaaatagcaaccttttgctgctttaaacaatacatttattcaaacatgataataaaaatgaaaaatggatcaatcctaaaagataataaatgaatacatctcaagttggcaattcacaaattatgtcaggcagagcacagcctgactcatcaacccctcccagtgtccctattttgaaaactcgtgatctaactgttattaagtgttttgaatatctaaagtgactgccaacaagactgtcagcagtagggcaggatatccatcattggcaacaaaaagagggcaagttgaacacaaatgttacaagacagagacagaacagggaacattttaaccttgctcagggcatgcccttagaaactataaggattgatgatgcatcaagattaatttgatgacttgcatttcaaccaagagggcagattttcaggaacgcatattctgacttggagctgggaaaggcacaaaccctgggcccagtccatctttggggactgagaacagagagttgagaactcatcttactaataattcctgcaatattggagtgtgtgtttttaacttggagtcagacacacttttcctcacccgcagagtggacagtaaaagtaatccagaatgttgcatctgtgttagctcttcttagaagggcctggagctgctacaggaagtttctcatttggaattatgaagttctttcttctcttgggccactttctcttgcaagtccagctgggcattaccctgccccgtggaatttactccaacacagaatccttcatgcttaaccccaattccactgtctgggccttcggagtcagagccaaagctcagcagcagataaagtacaaaagctagcaaggtagaatttgaagcaaactgccctggtgtatggtttttagggctgccataacaaactaccacagactgggtggcttcaactacagaaatttattgtttaacaattctggaggctgaaatcctgatatcaaggtgtcaacaaggttgatttctcctgaggcctctgtctttagctggtagattcctgtgtctacacatggtagtccctctgtgtgtgtctacgttctaatctcctcattttgtgaagacaccagtcagcttggattagggcccacaataggacctcattttaatttaattaccccttcaaagaccctatttccaaatacagtcactttctgaggtaccagggggttaggacttcaacaggagctgatcataatcacaaaagacacaatcccaaatatcatcatcttgaaatcctgaaagatcaaaatcctgaaaatacagagacagccaggtgggagggggtcccgagagaaactccaactggcctgcacactgggaggagcatgcactggggtgtagccacagaagttcgcgcctttgcagcagcgaggagcctggcccctcctcttcctgggtggtacccaggattcaatctgtgaggcaggaagcacactagcggaccctggctttgtggagggtccctatttcccctttttcccccttttgcccaataaattccattattctcacccttcaaattgtctgtgagcctaattttttatggccatgtggcaaggacccacatctttagtggaactaaggagagagtcctacaacaatataattctggaaaaaatgacttttaaaattctttaagatggagccaagatggccgaataggaacagctccagtctacagctcccagcgtgagcgacgcaaaagatgggtgatttctgcatttccaactgaagtaccgggttcatctcactggggagtgtcagaaagtgggtgcaggacagtgggtgcagcacaccaagtgtgagctgaagcagggcaaggcatcgcctcacccggtaagcgcaaggggtcagggaattccctttcctagtcaaagaaaggggtgacagacagcacctggaaaatcgggtcacctccaccctaatactgtgcttttccaacagtcttagcaaacggcacaacagaagattatatcccacgcctggctcggagggtcctacacccacggagccttgctccttgttagcacagcactctgagatcaaactgcaaggtggcagcgaggctgggggacgggtgtccaccattgccgaggcttgagtaggtaaacaaagcggctgggaagctcgaactgggtggagcccaccacagctcaaggaggcctgcctggctctgtagactccacctctgggggcagggcatagccaaacaaaaggcagcagtatcctctgcagacttaaatgtccctgtctgacagctttgaagagactagtggttctcccagcacgcagctggagatctgagaacggacagactgcctcctcaagtgggtccctgacccccgagtagcctaactgggaggcaccccccagtaggggcagactgacacctcacacggctgggtattcctctgagacaaaacttccagaggaacaatcaggcagcaacatttgctgttcaccaatattcgctgttctgcagcctccgctgctgatacccaggcaaacagcgtctggagtggacctccagcaaactccaaaagatatgcagctgagggtcctgagtgttagaaggaaaactaacaaacagaaaggacatccacaccaaaaccccatctgtacgtcaccatcatcaaagaccaaaggtagataaaaccacaaagatggggaaaaaacagcagaaaaactggaaactctaaaaatcagagcgcctctcctcctccaaaggaatgcagctcctcaccagcaatggaacaaagctggatggagaatgactttaacaagttgagagaagaaggcttcagacgatcaaactactctgagctaaagggggaagtttgaacccatggcaaagaagttaaaaacctggaaaaaaattagacaaatggctaactagaataaccaatgcagagaagtccttaaaggacctgatggagctgaaaaccaaggcatgagaactacatgatgaatgcataagcctcagtagctgatttgatcaactggaagaaagggtctcagtgatggaatatcatatgaacgaaatgaaacgagaagagaagtttagagaaaaaagaataaaaacaaacgaacaaagcctccaagaaatatgggactatgtgaaaagaccaaatctacgtctgattggtgtacctgaaactgacggggagaatggaaccaagctggaaaacactctgcaggatattacccaggagaacttccccaatctagcaaggcgggccaacattcaaattcaggaaatacagagaacaccacaaagatactcctcaagaagagctactccaagacacataattgtcagattcaccaaagttgaaatgaaggaacaaatgttaagggcagccagagagaaaggtcgggtaacccacaaagggaagcccatcagactaacagcagatctctcagcagaaactctacaagccagaagagagtgggggccaatgtccaacattcttaaagaaaagaattttcaacccagaatttcatatccagccaaactaagcttcataagtgaaggagaaataaaatcctttacagacaagcaaatgctgagagattttgttaccaccaggcctgccctaaaagagttcctgaaggaagcactaaacatggaaaggaataaccggtaccagtcactgcaaaaacatgccaaattgtaaagaccatcaaggctaggaagaaaacgcatcaactaatgagcaaaataaccagctaacatcataatggcaggatcaaattcacacatgacaatattaaccttaaatgtaaatgggctaaatgctccaattaaaagacacagactggcaaattggataaagagtcaagacccatcagtgtgctgtattcaggaaacccatctcacatgcagagacacatatgggctcaaaataaagggatggaggaagatctaccaagcaaatggaaaacaaaaaaaggcaggggttgcaatcctagtctcagataaaacagactttaaaccacaaagatcaaaagagacaaagaaggccattacataatggtaaagggatcaattcaacaagaagagttaactattctaaatatatatgcatccaacacaagagcacccagattcataaagcaagtccttagaggcctacaaggagacttagactcccacacaatactaatactaatggtagactttaacaccccactgtcaacattagacagatcaacgagacagacagtcaacaaggaaatccaggaattgaactcagctccgcaccaagaggacctaatagacatctacagaactctccaccccaaatcaacagaatatacattcttctcagcaccacatcgcacttattccaaaattgaccacatagttggaagcaaagcactcctcagcaaatgtaaaagaacagaaattataacaaactgtctctcagaccacagtgcaatcgaactagaactcaggattaagaaactcactcaaaaccactcaactacatggaaactgaacaacctgctcctgaatgactattgggtacataacgaaatgaaggcagaaataaagatgttctttgaaaccaatgagaacaaagacacaacataccagaatctctgggacacattcaaagcagtgtgtagagggaaatttatagcactaaatgcccacaagagaaagcaggaaagatctaaaattgacaccctaacatcacaattaaaagaactagagaagcaagggcaaacacattcaaaagctagcagaaggcaagaaataactaagatcagagcagaactgaaggaaatagagacataaaaaaccctttaaaaaatcaatgaatccaggagctggttttttgaaaagattgacaaaattgatagactgctagcaagactaataaagaagaaaagagagaagaatcaaatagatgcaataaaaaatgacaaaggggatatcaccatcaatcccacagaaatacaaactatcatcagagaatactagaaacacctctacacaaataaattagaaagtctagaagaaatggataaattcctcgacacatacaccctcccaagactaaaccaggaagaagtggaatcgctgaatagatcaataacaggctctgaaattgaggcaataattaatagtttaccaaccaaaaaaagtccaggaccagaaggattcacagccagattgtgtcagaggtacaaggaggagctggtaccattccttctgaaactattccaataaatagaaaaagagggaatcctccctaactcattttatgaggccagcatcatcctgataccaaagccgggcagagacacaaccaaaaaagagaattttagaccaatatccctgatgaacattgatgcaaaaatcctcaataaaatactggcaaaccgaatccagcagcacatcaaaaagcttaaccaccatgatcaagagggcttcatccctgggatgcaaggctggttcaacatatgcaaatcaataaacgtaatccagcatataaacagaaccaacgacaaaaaccatacgattatctcaatggatgcagaaaaggcctttgacaaaattcaacaacccttcatgctaaaaactctcaataaattaggtattgatgggacgtatctcaaaataataagagctatttatgacaaaaccacagccaatatcatactgaatgggcaaaaactggaagcaatccctttgaaaactggcacaagacagggatgccctctctcaccactcctattcaacatagtgttggaagttctggccagggcaattaggcaggagaaggaaataaagggcattcaattaggaaaagaggaagtcaaattgtccctgtttgcagatgacataattgtatatctagaaaaccccatcatctcagcccaaaatctccttaagctgataagcaacttcagcaaagtctcaggatacaaaatcagtgtgaaaaatcacaagcattcttatacaccaataagagacaaacagagaaccaaatcatgagtgaactcccattcacaattgcttcaaagagaataaaatacctaggaatccaatttacaagggatgtgaaggacctcttcaaggagaactacaaaccactgctcaatgaaataaaagaggatacaaacaaatggaagaacattccatgctcatgggtaggaagaatcaatatcgtgaaaatggccatactgcccaaggtaatttatagattcaatgccatccccatcaagctaccaatgactttcttcacagaattggaaaaaaatactttaaagttcatatggaccaaaaaaaagcctgcattgctaagtcaatcctaagccaaaagaacaaagctggaggcatcacgctacctgacttcaaaccacactacaaggctatagtaaccaaaacagcatggtactggtaccaaaacagagatatagaccaatggaacagaacagagccctcagaaataatgccgcatatttacaactatctgatttttgacaaacctgacaaaaacaagcaatggggaaatgattccctatttaataaatggtgctgggagaactggctagccatatgtagaaagctgaaactggatcccttccttacaccttatacaaaaattaattcaagatggattaaagacttatatgttagacctaaaaccatgaaaaccctagaagaaaacctaggcaataccattcaggacataggcatgagcaaggacttcatgtctaaaacaccaaaagcaatggcaacaaaagacaaaattgacaaataggatctaattaaactaaagagcttctgcacagcaaaagaaactaccatcagagtgaacaggcaacctacagaatgggagaaaatttttgcaatctactcatctgacaaagggctaatatccagaatctacaatgaactcaaacaaatttacaagaaaaaaacaaacaaccccatcaaaaagtgggtgaaggatatgaacagacacttctcaaaagaagacatttgtgcagccaaaagacacatgaaaaaatgctcaccatcactggccatcagagaaatgcaaatcaaaaccacaatgagataccatctcacaccagttagaatggtgatcattaaaaagtcaggaaacaacaggtgctggagaggatgtggagaaataggaacacttttacactgttggtgggactgtaaactagttcaaccattgtggaagtcggtgtggcgattcctcagggatctagaactagaaataccatttgacccagccatcccattactgggtatatacccaaaggattataaatcatgctgctataaagacacatgcacacgtatatttattgtggcactattcacaatagcaacgacttggaaccaagccaaatgtccaacaatgatagactggattaagaaaatgtggcacatatacaccatggaatactatgcagccataaaaaatgatgagttcatgtcctttgtagggacatggatgaaactggaaaccatcattctcagcaaactatcgcaaggacaaaaaaccaaacaccgcatgttctcactcataggtaggaattgaacaatgagaacacatggacacaggaaggggaacatcacacactggggcctgtgtagggggagcggggagggatagcattaggagatatacctaatgttaaatgacaagttaatgggtgcagcacaccaacatggcacatgtatacatatgtaacaaacctgcacgttgtgcacgttgtgcacatgtaccctaaaacttaaagtataataaaaaaattaaattaaaaaataaaaataaaataaaattctttaaaatatttctatattatatttatgattatatttatattatattttaaaggggatttatttcagaaacacacaaacacaagagaacacttcataagccactttacacaataaaataggtaatagtaacatacacattttggcaagcataaacactgaggtatactaataacagtcacacaggtataacaattatgagcagatgaacaatattcataaagaaataggtcaaaaagcaaaatgtatgaacgcttatcactatggctggtaactgtgtgcacccagctttataactgcagtcatctgaaacactgtgatgaacaacccaagtcttttgataagattaatccaaaaccatgatgggtcactgccgcgtcatcactgtaagtagcccaaagagccagtatctcgagaaattttatctttcacaaatgcaaatgtacaaaaaggatatctcttatataacatttttacatacacgcacaatgtttacacacctagtcaacattgtgatgatgcacgttcatggaatcacatttgtaaaaaattacataaaacaaattagaactctctgaaagtcttaatacaatttacatctccagtgttagcgattatgaaaaggtgaaatatatagcacagcatattgtaaaaaataatgccaacaattttaaatagtgaaaaacactaaaaataaaagaaaatttaacatgaaaaaacacattgcaaagaaagactgtgagcaattgcacacagacagcccctaaaagctaactttcataatcactaactatattctgaagtctggcatcatgagaagcttctttttatcttttgggatatgtatctccttggagaatatgttgacatttattttctatgtggcactgctctttttaaaattactgtataattcaatagacaccaacataagcattcccatcttaaactattaaactctcccatcttctgtgctatgcttatatgttgttttggatactcagaaatccattccacatgcacctatatgcagaccacaaatttggcagaaacaatactggtgattcaacagcaacaccattgtgtgtttccttatcctaccgtgcacataattattctcaaacactaagtaacttctctggcttcttcagccaaatgcagctttaattctttaaaatctggaatgttgtcagctaggaaggaatgtcaatgcaggcaaatgacacattttttaaactgaagttttcactggaccaattcatccatctgaatttccctccaaatgcactaggctaaacggaaaaacaaacttcattagtaataccttgaaattcacttttataatcctttatgacacctaatttcgagtctgtcattacggtttgggaattcaattgaaatccatttccttctgcataaagactacaaggtaatagttcaacctgacatgatgcaaccatcctgtgactgtgactttcatcattttagacataagggatattatactgcagggattttcatcatttgggatttcatcatttgagattacggcattcaggattgtgtctttcagaattatgatccaaacctgacatcaacacgtgaatgggggatgcacaatcccacccatagtacttgggaactccagtggaccatgggctcacttgagctccaagctcctgggtcgaacatccaactgcccttcctcaccttgatgaccaagtacctgtgagatcagctctattctacaaggaatggttatgcacacttagatttctagtggccaccaaaaagatttaaatggtgtaaaaagtaaacaaagtcagacactagttaaagaggtaaagacagattttcatcagtaatgtactattgcaatagggaaatgagttctgcatgaaccgaagtcaacttcaatttgtggagaggtgactggtgttttaaagggagaatgagagagttgggagggggcaggtattagagtcagggaagtaaaaaaaacctacaaaaaacagaaatagggaatcggttcatgtgaagtatctcaggatgcaagacttcagaatatagttagtgatcataaaagtcagctcttaggggctacctctatgcaattgccttgccatatgttttccatatgttagattttccttttttaagtctttttcactattttaaattgttggcattattttgtacaatacactatgatatgtatttcatcttttcaactgatcatgagcctttatgtcccaaaagccagtataccagaaaggacaggaagttgaagttgaagaacagcaagactttcatcagaaagtcacaaagagccacagtgatgactccctcttttttaaactttagctaaaggctgtggtaaagtggaaaaggaaaaatatattaagaaagcagaagatttaagaccccactgactctcaaaccaaaacaaagcccatcgttgcaaacttacagaagccagtttggttatgcacacttagatttctagtggtcaccaaaaaggttgaaatggtgtcaagaataaacaaagccggatgctaaagaggtaaggacagattttcatcagtaatgtactattgcaataaggaaacatgttctgtataaactgaactcagcttcaatttggagggaggtgactgttgttttaaagggagaatgagagagtagggagggggcaggtattagagtcagggaagtaaaaaattacaaaaaaaacagaaacagggaattggttcatgtaaaatccacacaactttgctaactggagcttatcagagttaggctccttccctcccacagaggctgggagacagggtccctgtattcaggtgttggctgaaacaaacagtacatccttgtgacagccttgagtgttctcaggcaagcattttatatgtgggtctagggtcattcttaggaacactactttgagctattagaaactatattagtgagtgttcaagtctttatatgccaggctgaggcctagtcaagaagagggctccaaagagcctggctagagtttggtgaaggagagaatctgttatagtgaaaatttactactctcccacacctcaccattaggttttttgttttttgtttttttgtttttgttgttgttgttgttgctgtttgttttttgagatggcgttgtgctcttgttgcccaggctggagtgcaatggcgcaatctcagctcaccacaacctctgcctcccaggttcaagcgactctcctgcctcagcctcccaagtagctgggattactggcacccaccactgtgcccggctaatttttgtatttttagtagacatggggtttcactgtgttggccaggctggtctcgaactcctgacctcgtgatcctcccacctcagcctcccaaagtgctgcaattacaggagtgagccaccacacctggccaccattaggttttaataaaaacaaatctcagcataaatttctttatatagacagacatgtagtagcaactattcattagcaagaaagcataaaagagtttatactatttgttctgtgtgctggatgaacgctttttaggtggcccagggatgaaacattcagttgaaatagacactgtgagatttccaaggcaggattctgtgcttacacagcaccatgcagtcagaaattctcctaagtcaacatctggattgaagggaatcaaaccatgactgtcatccttaaaaatatcaggtcaggccttcgtgcatttttatactctttttaaaaaggatggagagactctgaactattttagccaatccatatgttcaaaatatgtttaatttcatcagtgagagccaaagcctatttctaacatccatcaggctaatcaacaaacactagattcagcaatggaaacccaaatttggaattgatatgctagttcatagagtatcagaggttgaacaaaaggatataataaagggcatgtagcagctgtttccacagtgggcccctctcacattataccccctgccacatctgaactgtgctgccctgctagcattctatctggccacatataaagttaatgccttagctaaagtttgctcatgctgtatgtactttaaagtaaattacagagattgtaatacatgtcttatacaaagctgaaccatggcaatggcaaacatactgcacctggggctaggacccctggattctgattttagggcacccaccttggacacaccgtctctttggacctcattttcctcgtctagaaaataaatggattgacttaggtcacatttctcaaatttgtcctacagaaacttagggttttgtggaggagattcaggaatcctacaaacctgtgatatacatttttatatcatttatttgcagtgtgtttttaaagaaaaaaagagaaagtatgatgtacatgtcagcatagcatgcacacacccagcaaaattcaacagagtagacttagtgctaccagaccaacttgtttttttcaatcttagaataaagcttctctaaccatatctgtaaatgatatataaagatactataaacatgtgattgagaaggtagattgtaactcaaccttttttgttgttaaatttaggcccatgcatgtcaactcatgtaaaagtacgtgacaagggacatgactaagatacaggtaatgtacttggcttaatgccaggaaaagcttaaggatggaggccttcatcacagcatagttgtcagttatgcaatagaaaggaaaggcccaacattttgtgcatttattgtaagttcttgttaaaatttgactctttaattttaaggctagatgcattgtaagtcttggggtctttttacctaactgtttcttttccccaggtaagaaaaataaatccttctaaagctgaaaattgatatgaatcactggttaaaaataaagcttccaagaagatttgttgatggatatggtgaatggatgtggctcaagttaaactgtcaaaatgcctgatgatcaccagctgatttttcaaccaggattccattcacaactgcacgtcaaatgaaggaaacctctctcaaactgcataacacaacttgaagacaataaagaatgagagtacattgcccattcattgagagtacattcaatgggttcgagtgaaattcttcaaaataattttgccttcaaatatactccagtgtaaatctgaaacaaaacatagtgaacatacaacataaactcagatttttcaacagtaattgaacaatttataggaaacatatgcaaacaatacttacatctaacaacaaaaatgcattaacttttatcttcagatgctgctctgtggcaggtctgggagaagctgttagaaaaagtttattatatcctggactcttgataccagcatgtcaactagagtgcatgcatgatgaagcagggactttgcttggttaactgcttatctccaggatctaggatgacacatactaggttctcaataaatgttgttgaatgaataaatgaatgagtaagttgatacaaaaatatacttagcattattatcagagctgagagaagaattcagatatgtacactacagatgcgtaaaaatttattctaagaaatgtttatgctatgactaaagaagcagtagattttcatggctgtctccattttgtttacttttatataatatgcccatataaacaaatacaatgaaaatatatccctagtaaaatacagaacacacacacaacaggagagggaatctttaaatgcatagacaggagatctacaagtggtgatatgtgggccaaatccagccatgcccattaattgacgtattgttcatatgctgtcaggctacaatggcagagttaaatatctgcaacagagacaatatggcacacaaagctgaaaatatttactgtctggccttgtacagggagagtctgcccaccccggtgtagataaagtataacataccatcaattaagaaaaaatgtaatgacaattataccaaaaagtagttataaaatggcagaaaaaaatcaaaggagtatcttctaaaagctattgccaaagtgattgaggcattccttgtacattatgaacctgagcatccactataaagaatatcccgttaaaagccatgcttaataattccatgcaaattgtagatgttaagacataatcatttaatcacaaatgtcttagggttacagtaacaaaagcagccagttcaagaatttacttttttatacctacattttcactatccttagagaaatatttcagctaagaaaaaaataattttcttttttgtctttttttttcttaaaaagaaggttaagtacctttggtaagtatctttcaaatatcacaagaaggcaccagcatgtatatctcagtaattttttagccttcatatattatttgtgaaataaaatacaaacacataaaacaacacaaaacaaggtataaggcgatcacacctttggcaggcagaattctaaagacatcctcccaagattctagtcccctggttattcaatcaaacacactcacctaagtactgctgtgaagagacattgaagatggaactaaggatacttattaactgaccttaaaatagggagcttatcctgtattctcatatgggaccaatgtgatcacatgagcccttcaaagcagcagaggaaagcagaagagttgcaatagaaggagaactctgagagattcaaaacgaaaaagggactccgtttactgctgctgtttgaagatgaagggggcaatgtaggggtggccttaagaagctgagtatattagttcatttacacacggctaataaagacatacccaaaactgggtaatttataaaggaaagaggtttagtggattcacagttcctcatggctggggaggactgacaatcatggcagaaggcaaaggagaagcaaaggcacatcttacacagcggcaggcaagagagtttgtgtaggggaactcccatttataaaaccatcagatctagaaagacttattcactaccatgagaacagtatgagggaaactgcccccatgattcaattatctccacctggccctgctcttgacacatggggattattacaattcaaggtgagattcaggtaggggcacagccaaaccatatcactgagggagctcctagataatagccatcaataaaacagaatcctcagccttgcagcctcaagaaactgaattgtggcaatcatctgaatgaacttggaagtgagctcttgctcagaggccccagataagagcccagctgaccagcaatgtgattctagccttatgagactcatagcagagaagcaagtcaagctcacctggacttctgacctacagaaccatgagaaaataaattgtggtttttttaagcctctaagtttatagcaatttgttacagcaataatagagaacgaatacaatgcccttgacatcctcacctgaaccaagaagtagagctttgccagccacctagaagccccctctatgtgccccaactcaaatgcagccacctctttctccacaaagaaaccactctcttgcctttacagtatcttcaaagtaatttctttcttgcattgtatagtcttatcatcaaaatgataagccccagatattatgtataatttacctcaattttttagaaatcaacacgtctgttacttccaatatacagcatctccctccatctccttcttttccttacagtccatctgtgtaaaaacacagccattttaacctgtagagcttctctcggtcaggattttgttgattgatattcacagtgcaattcagcaagcttctcagtcctctctattttctgcaaattggcagctagatacagagtcttgatcaatctcagattgcatccctttgtcaaggttataggtgttgctgtacttctctccctttaggaggcacagaaggtctgattttcactctggtcatgacattagcagctgaatacctagatcgtatttcatgtgtgttgcaaaatggtgataattctatcacttctttctcattcattcattggaatactcttgttaaagagatgcttcccctcatctactattgattacccagtgagacagttcatatgagagagggactgaacgcttgggtttttctctttccttttaaccagtttttgaaacaatgaattgattcagcatcttccaaagataatcaattaatttttaaatatctttatgaatttaaggatttaaatatctctgatggggttcactccacgtcagttaaaatccttattaaaagcccaaattgttccatttttggccagtgagttggcctcttcaagttggtttctgaagccttttctcatgaccctgatggtctctggtgggttccttgaaatctggcatgacaaggtgttacaggttgatcttatacatatactgcccccgagcctgcaatcagccatttctccaaaaagttctggttgcctcagtgggaaatagtatttcaatgccacaatctaggagctaggattaacgatattttaaaaattggaacaaactcaagttggcaagagatagtgatgttacgattcaacagcagataaagtgtcaacaaagatgtcagaatataaagcttggacccagcatagaatcaaatgtttactcttttgaaacaacctgtgaatatctaacaagacaacactggagatagctgaacattctttaaatgactttgttaaacatttcattatttcagaaaataatatgcattttcaccaacacaaactaaccaaaaaactgtttattggctctctccaaatttcaaagtttatcatacagaaatgcaggaagctactaaatcttactcattatttgactggaacaaatgttctactcttctttcaaccttcccaagtggtttagttaaagaatacaccagaatggtaaagtgcagtttaaaggccaaaattatagtcattaattaaaacccactttatctaaaagattgtatcacccatgttattcacagtactgttgacccatgagattccttgcaaccctggacattctatgattccatatgcattataaatttatttcagcaagagactattactcttactagtctcagcaagagactagtatccatgagatactaatggaagcaaaagaaagagatacaatcagggacaagaaaagcaactgtcctcaagaaatgcaattaatagtgtacagaaatgcaatctaaaaattaaaacaaaatatgaagctatatgcaatgattaaaaattctatcctaggaatatatatactgtatatgctttacaataaggaaagtaaagtaaaaatagaatatggaacaatattcatattttgataccattttctcttttaaataaaaacactataaaactaaccaaagaatctaaaaggaaataaaccaaaatgattaatagtatattttatttatttttgatatttttatgttgtagtgattgaatagtttttaaatattagtattttcatttcaataaaatacatttaaatgtaaaacatgatctatgcaaaaacttgtatatgaatgcttctagcagcattattcatgataaccaaaaagttcaaatcacctttcatcagctgatgaaaggatgaacaaagtgtggtatattcaaacaagaggctattattctacaataaaatggaaaaaagtatacactacaacatgatgaactttgaaaacattatactaagtcaaagaagccagtcacaaaaggccacattttgtatgcttccatctgcatgaaatgttcaaaataggcgaatccaaagtggcagaaaatagattagtgttttgccagcagctggaggagggggaggaatggggagtgactgctaattagtactgggtttctttgtggggtgatgaaaatattctggaattagatagtggtgatgattgcataacttcatgaaaatgctaacaaccattgaaatgtacactttaaaaggggggactttgtggtaatgaattatgtctccagtaaaaacttttaaaatatatgtataatgtagatggtaaaataattcattcaaaaaacatttactttttataaagctctatacagatgagaacaggagaggaactagagatctttacaaagaaggtggcatttgtgaggggttttaggcatagaagcgtgcaccatttgcccaagttttagcaagcatgacaaattattaaagctaatgtcatcatagtaataaggacttgggtactatgacttataacattttcaacctaacaaggattcacttttaagcccgatcaactggaggtgaaagttttctgccaagcccccaaaagaatgaggaatttttcaggttgtacatgtatttcttaaccaaaatctctgattctgcttcaacattttgattgctgcagcaataatgttaaaatgacacccgttaagcatgccgcagcctgccaaaatgaagtacatttttatcttttgggaatcacatcattttgtattcatagaacatgcaggaaagcatgctttcttctttatcatattaaagacagtgagccctcatcatttcagctggtttacctaactaacttgccttgaggataacagtgacacattggcaatctcatctagctatctaagatgcacatatatcacctcttatacactgccagaaagaaggaagaaagactctaattttgtctttcttaatcagtgtttagctgaattaaaattcaacatggatttttcacttctttacccacacaatcaagagagaattttttttcaaagtatttccaggaaaatgtacccatttaaaaatttatttacaaatgtatgagtagtagatagtacaaacaaagcattaaatgattaccaaatatatctgcttaaccattacaatgtaattacagaggcagtttcaaaagtacattgtcaaaggaagggtacctgtttgtaattattggcctggcctacagtttcttggacaattccattcctcaagcacactgggcattcataccaagtacactctgaggcttactttccgttttctcttgtttcttttaatggttacggtacatacttgccataaatagtagactacccaacatgtagaatttgctttgacctaatttgcaggaatgtcttataagtctgtgtgcaatatctatataactaacatacacatcatctttgaatgctctaagtactatgagaaaaacaacaaaaggaaggtacagaaaatcttagtatagcactaagaggtcatcaacattacaagctcttaaaattctttaaagcctccctccatcatttatggttgaagttctaagcccttaatgtggttctcaaaaccagccataatctggtccctgcctcactacactatcctctttcttcaactgtccttgacacactctacaatgtagttatacttgcatttcccaaatgttcaatttccctcctctatttttttttgtattttcttctctctgcctggaacatttatctcttcctggttcttggagtaattactttttcaagattcagggccggacgcagtggctcacgcctgtaatcctagcactttggaaggctgaggcgggaggatcacgaggtcaggagattggagatcaaggccatcctagctaacacggtgaaaccccgtctctactaaaaatacaaaaaattagccgggcgtggtggcgggcgcctatagtctcagctactcaggaggctgaggcaggagaatggcgtgaacccaggaggcggagcttgcagtgagccgagatggggtcactgcactccagcctgggcaacagagcgagactctgtctcaaaaaaaaaaaaaaaagattcaacattgtaaaactttgctgaactttctcctcctagctaggctgagtcaggtatgaaggccaatatgcgatcttttatcttgactttcttatgcccaaaatactgcctgatgcagttagtgcttaatatttttttctaaatgaacaaataatgaaccagtgaaaaaatatatatagcagcttgtcttagttcattcagactgctacaacaaaataccattgctatagtttgttttgtttaacccctccaaatctcatgttgaaatctgatccccatgttgaagatggggcctaatgacaggtatttgggttgtgggggcagatctctcataaatgacttggtgtgtgtattagtctgttctcacactgctaataaagacatacccaagactgggtaatttataaagaggaaacatttaattgactcagttcagcatagctagggaggcctcacaatcatggtggaaggtgaatgaggaacaaagtcatgtcttacatggaagcaggcaagagagcttgtgcaggggaactcccatttataaaaccatcatatctcatgagacttattcactaccatgagaaccgcccccatgattcaattatctccacctggccccacccttgacacgtggggattattacaattcacggtgagatttgggtagggacacagccaaaccatatcattctgcccccgccccctcccaaatctcatgtcctcaaatttcaaaaccaatcatgccttcccaatggtcccccaaagtaagtcttacttaactcatttcagcattaacttaaaagtccacagtccaaagtctcatctaagacaaggcaagtctcttccacctatgagcctgtaaaatcaaaagcaagttaattacttcccagatacaatgggggttgtatcagtccaatttcacactgctgataaagacatacccgagactcggtaatttttatatatatatataaaggttgaaggaactcacagttccacatggctgaggaggccccacaatcacagcaaaaggcaaaaggcacatcttactatggcagcaaacaagagagaatgagagccaagtgaaaggggtttccccttataaaaccatcagatcttataagacttattcactaccacaagaacagttttgtgggaaactgcccccatgattcaattatctcccatcaggtccctcccacaacacatgggaattatgggagctacaattcaagatgggatttgggcagggacacagccaaaccacaaccggggtacaggcattgggtaaatatacccattccaaatgaaagaagttggccaaaacaaagggctacaggccccacgtaagtctaaaattcaacagggcagtctttaaaccttaaagttccaaaataatctcctttgactccatgtctcgcatccaggttgcactgattcaagtggattcccatggtctcgggtagctctgcccctgtggctttgcagggtatagcccctctcctggctactttcatgggttgtcattgagtttctgtagcttttctaggcacacggtgcaagcagtctggatctaccattctggggtctagcggatggtggccttcttctcacagctcctctaagcagtgtcccagtaagaactctgtttgaggactcccatcccacatttccctttggcactgccctagcagaggttctccatgagggctctgcccctggaacacaactctacctagacatccaggaatttccatacatcctctgaaatctagacagaggttcccaaactgcatttcttgacctctgtacacctgcaggcccaacatcatgtgtaagccaccaaggcttggggtttgcaccctctgaagccacagcctgagctgtaccttggcctcttctagccatggctggaactgaggcagctgggacacggggcaccatgtccggaggctgcacacagcaggggagccctggacctggccaaggaaaacatttttttttctcctaggccttcaggcctgtaaggtgaagagctgctatgaaagtctctgacatgccctggagacattttccctgttgtcttggttattaacatttggttcctcattacttatgcaattttctgcagcaggcttgaatttctcccccagaaaatgggtttttcttttctactgcattttaagcctgcaaatttttcaaacttttatgatctgcttcctgttgaatgctttgctgcttagaaatttctttccccagataccctaaatgctctctctcaagtttaaaattccacagatctctagggcaagggcaaaatgctgccagtctctttgcatagcaagagggacctttactccagttcccaacaggttcctcatctccatctgagatcatcccagcctggaccttattgtccagatcactatcagcattttggtcaaaaccattcaacaagtctctaggaaattccaaactttcccacatctgcctgtcttcttctgagccctccaaactgttccaacctctgtctgttacccagttccagcgtgtcttcagagtaatgagtgacttctcactctattagtttccacaagagctagttgttgaaaagaagctgccaccttctttctctcttgccaggtaatctttgcacatattagctccccttcactttcaccatgagtggaagctccctgaagccctcatcaaaaacagatgctgtctccaggcttcttgtacagcctgcagaatcatgagcccaaaaaaaaaaaaaaaaaaaaatcttttctttaagaattacccagtctcgggtattcctttagcttacagtaatacaaacaaacagacaaccatagacacggtgacttgtaaacaatgggaatttatttctcacagttctggaggctggaagtccaagatcagggcagattcagtgtcttgtaagggcctgattctctggctcataaacagtgtctttttactgtgttctcacatggaagaggtgaacaagctcctgtgggcctcttctataaggagatggatctcactcatgaaggttcaaccctcctgattaaaccacctcacaaaggacccacttcttaatactattgtattgcagtttaactatcaatatatgaatttaggaaacacacgaagattcagaccatagcacatcatacaacttttagctggagcatgagctctggagccaactgtgtttgaatcactatgcaactacttactagctgtgtgctgttagaatgggctttttaacctctctttaactcaattttctcataaactggagagcagatatatatatataaagcctgcttcatagctttaaatcggttaaaatgaaaaattgtttaaaataatgttgagcacattacaaataatatgttagtgcttactgacattataattgtaattacttgtattacagcatacatgccaggaatacaaagacttggtcctatcccccctcaagcggagagattcttttttaaagaattatttaatttaaaaaaagaaagaaaagaaatgaggaatgactatgaaaatgtgtaactaatacagtaaaaccaacaaaagctgtaaataagatcaaaaaactgcaattttatgaaggattgaagtattacaaggctaagaaaaactaattttttctactccatctcctatgaactgtttgagcaaacatattttcactgattagatgttttcactgattagatattttcatgaatatattttctatgaactgtttgaacaaagacattttcactgattagatattttccctgattagatattttccctgactagatagatcaattatgtttttaaaaagacaaactatatcttgcatacctaccccgaccaaaccccacatgggtggcgaatgaaatccatcaccaaaacttatcagaattcacattatcccatggttttgcatattctttataagatcaaccaaaatgtaagcattcatgtgtttttttaatctctgaaatgttcacctcctaatattatttcatattttaattcatgcaaccattgctcaaattattgttggaagtcatctttctgaatggcctctagtagtaattcatgaaccaccagagaaaatctaaactatgctttttagttaaaattacccttttaatgaaatgctacatgactgtcttagtctgtttgtgttactattgcaaagtatcttagtctgaataatttataaacaacagaacttatttcttaccattctggatgctgagaattccaagagcaaggcacaaacagttttggtgtgtggtgagggcctgcttcctggttcacagatcgtgccttgtagctatgtccacatttaggaaaaatgaatacattgaaattgtccaaagattttgaagatattaagttgggtcaaaatttacaggtaagtttatcagtcagctgagtttgaattattttaggagaaagattaatgtgggaccaaacaaaaatttaacaagaagaatacatgattttttaaagtatcattggcattttagggtttgataaaggtaaaaataaaattgcattcactgaactttagttcgatttaagattttatcaaatttaagagaaatttgtttaccaagaagatataatcaataaaagggtggagtgccaagggcaggtataaaagtttttcattaaatatatttaaggaaaaagtttgcaagcacaaacatgtctgtcctcttttcaactttgagtttgttaacactgtgcaagaacagatggttcagatagggtttcgtcatgccccatgaaatgggaactgcaaacgcttgatttatgtgacaagaatccttactcagattaatttcattgaattttacaattaaatcactaaaatattaccatgttttccatatcatttagatttcttcaatacagtttaataaatttataccaattttctttccccaaaactaaatgctaaataaagcagcaactgatccttaaggtgagaaacagaccaacagtccctggccaacacagtgtttgagacttaacaaaacatccaggaggagaaatgcatccccagggtgtccccatctctcttcctcttcccaagtagtgacccccttcccctctcctcccaccagggaattggtgtcacccccactatgtagcttttcctattctgctttgcctctctaactttgttctctcaataatacctctattatgacaactgtcctcatcataatcaatggtatttgaagtattgttcacctcagaagaacacgtttccatttttaaacagtcatcaaaatattttgctttctcaaaaaacaaggggaattattaagatggatagactactagctagactaataaagaaaaaaagagagaatatccaaataaacacaatcagaaataaccatggggacattaccgccaaccccacagaaataatattttaaaaagccttcagagactactatgaacactgctatgcacgcaagctagaaaacctagaagaaatggataaattcctggaaatgcaaccttccaagattaaaccagaaataaactgaatctctgaacacaccaatgatgagttcagaaattgaatccgtaataaaaagcctaccaaccagaaaaagtccaggaccagaaagattcacagccaaattctaccagatgcataaagagctggtaccattcctattgaagctatttcagaaaattgaggaggaggggctcttccctaactcattgtatgaggccagtatcatcctgataccaaaagcttgcagaaacacacacacacacacaaagaacactttaggacaatatccctgatgaacatagatgcaaaaatcctcaacaaaatattaacaaactgaatccagtagcacatcagaaagctaacctaccaggatcaaggaggctttatccctgggatgcaaggttggttcaacatatgcaaaccaataactctaattaatcacataaacagaactaaaaacaaaaaccatatgattatctcaacagctgcagaaaaagcttttgataaactccaacatgccttcatgatgaaaaccctcaactaggcattgaaggaacatacttcaaaatagtaacagccatctatgacaaagccacagccaacatcatacagaatggccaaaagctggaagcattccccttggaaaccagaacaagacaagaatgccctctctctccactcctattcaacataatactagaagtccttgccagagcattcaggcaagagaaagatataaaaggcatccaaataggaggagaagaagtcaaactatccctctctgcagatatgattctatatacctagaaaactccatacctctgaccaaaaccccttgatctgataaacaacttcagcaaagtttcagtatacaaaattaatgtacaaaaatcagtatcattcctatacaccagcaacatataagctgagattcaaatcaagaatacaatcccattcacaatagccacacacacacatacacacacacacacacacacacacacacacacacacagacaaaacctagaaatatagctaaccagggtggtgaaagatttctacaatgagaattataaaacactgttcaaagaaatcagaggtgacataaacaaatggaaaaacatcccatgtgcatggataggaagaatcaatatcattaaaatggccatattgcccaaagcaatttacagattcaatgctattcctatcaaactaccaatgacattcttcatataattagaaaaaactattttgaaattcatatggaaccaaaaaagagctcaaatagccaaggcaaacctaagaaaaaaagagtaaactagaggcatcacatttctcaatttcagactgtactataagtctacagtaaccaaaacagcacggtaccactacaaaaacatatacacagaccaataaaagagaattgagagctgagaaataacgcagcacacctacaagcatctgatcttcaacaaagtcacaaaaacaagcaacaaagaaaggactccctatttaataaacggttctgggataactagctagccatatgcagaagattgaaactggacccctgcctattaccatatacaaaaaccaactcaagatggaataaagacttaaatgtaaaacctaaaactataaaaacccagatggtaacctaggaagtaccattctggaaataggacctggcaaagatcttatgacaaagatgccaaaagctattgcaacaaaaaaaaaaaattgacaaatgtgacctaattaaatttaagagcttcttcacagcaaaagaaactatcaacagactaaacagacaacctacagaatgggagaaaatatttgcaaactatgcatcagaatctataaggagcttaaatcaataagcataaaacatacaaccccattaaaacatgggcaaagaacatgaacaggcacttttcaaatgaagacacacacgcagccaacaagcatatgaaaaaatgttcagtgtctctaatcattagagaaatgcaaatcaaaaccacaatgagataccatctcacaccagtcagaatgactattatcaaaaagtcaataaataacagattctagtgagggtgcagggaaatggaaacacttatacacagctggtgggaatgtaaattatttcacacattgtggaaagcagtttggtgatttctcaaagatctcaaagcagaattaccattcaacccagcaatctcattatagggtatatacccaaaggaatataaatcattctaccataaagatacatgcacttgtatgttcattgcagcactattcccaataccaaagatgtggaatcaacctaaatgcccatcaatggtagactgggtaaacaaaatgtgtgacatatacacaatggaatactacacagccataaaaaaagaatgagatcatgtcctttgcagcaacatggatggagctggagatcattatcctaagtgaactagcacaggaacaaaaaagccaaataccatgttctcacttataagtggaagctaaacattgtgtacacatggacacaaagaagtgaacaacagacactggagcctacctgagggaaagagactaggaggaggatgagaatcaaaaacactacctatcaggtactgtgcttattacttggctggtgaaataatctttacaccaaaccctggcaacacacaatttacttatataacaaacctgcacatgtacccctgaaactaaaataaaagttaaaaaaaaaaggtgggggaaggatgattccctgtaggatcgctggctggacagatggggaggggatgcaataagcattattatcctggttttgcaggttaaggccagggagagaataaagccaacctcattaagcaccagatgtcaggcaccacattggaagtcttgcttcctttttctaacatagtctttacaataatgctccatgttactgacattgtattatgaaataagaagctcatgagaggaactaagcatcttttatctgctcatcctttatctatggataaagacaggctgaaaccccagacttctgttccagtgctctatccatgggtccaagccaaaggcagcacttccctgtggtagctgttactgtatttcatttcttacgttccacatcccttacattttatcagcatcctctggaacaggaaagaacattgtttttatagaagtacattcgtcccgtgtaaaatttattggatgctctgattcagagttacagaaaaaaaattacagtgtagtaacactatatttaatgaggtgttacatattttccatccttctcttggcattttagacattattctcttaggtcaggacaccaacatttcatgctgttttcgtggacttgaagcttacttgactatggttaatgctaattaatattgtgaacccatacaacatgtctgctcatgtcacattagcattgaaacactatccaaactattgttttggaagttaagatactgaagaaataaaccccttgatatataaacagtagcttggaggtcatgtttctagcaccttctcgtgccttgaaaattagctaagttagctgcatcttcctagaactgtagagggaagccagaggtagttcaaaatgctgactttctataaactaagcccagctggggaatataattcagaccacatagaaaacactttttccccatttttatcccttctcagacctcctaatgcactgctcaagcaattaaatctccttatactcatgaggcatttcctaagtgccctgagacttcaaacaaaacgcatggctggttaaaggtttgctttttttacgtcctggtagaaaatttatattggatctgggacaccatctgggtgagaaacaagtgattagggtgttagctctaaaccccttgcttagcaattttactaaatattttcttcataccatgatattcagcatgttccagaaggttttggcaaaaaaaaaaaaaaaaaaaaacttattcccattatactagggttatgaaatgcaggtaggttttgaatggacacagaagggaacaaccgtttaaaaaaaattcaaattgcttcaggtaaccctaatttacccctgactttcagcggtcattcataggaaaactgtcacccctaagatgtactaaaattactctgaagtaatttaaagccaatttaaagccaatcatttaaaataaatgttgatgacaaagtatacaagtttcaaaataaaaatgctgaatgtaaacacaacttaatttgtcctggtccctgtaccaggtggagcatgtaaaggcagcaagcactgatgttttcctggcttggcaaactgcctcactggcttcaaactgctttggcacttctaattttacattcggagtaacggcctccttccctcttcactgctgctatcgttcgtacttgctggtctccctctaggcatctttggcttgaagtcaacaaaattacgtgagggtgaaagaaatagaaactgcagttttctctccaagcagcttggtaaattttcatttcttttcttttttcttgtcctaccttgacttattcctaccactatcatactactagatcaaggctcaaaatattaacaaatattttttaacattttactgagcccattctctcctatacattgaaatctatatgtctatggactttaaataactacaatgaagaatttcattgatttgaataattttaagactcttttttactacttttcttttctttatctacccaaagaaaaatcaagatttttaaataatttcttcaggaggctaccttcctaactcattcattgatagaaggaaagacttagaaataggttcccatgtgttcctcatgacagaaatagaaaaccaacataatatctcttggcttcttctcttattacttggttaatatgttagctgcatagtacagcctacacaatactgtacttgagagtgaagagttgggagtcagaaaaatgtccaacttcaaagactctgctgtattcattttccaccataatgaattaccataaacttagaggtttaaagcaacccaaatgtattatctgacggttctgtaggctagaagtccaacaaggctctcgctgggccaaaatcaaggtgtctgcaggactgtgttcctttctggagactctaagggtaaatcaacgttctcgccttttccagcttccagagactttccacattccatgactcatgactccctcccccatcttcaaagccaaatgcaacaaaaatgcagagaaatgcaattctctgaccattctgtaattccatcttcctttctctgatcacaatgggaaaggttgtctgctcttaagattagcttgagcccacttggataatccaagataatttctaaatcttaaagtctttaatatcacatcttcaaagtcatttttgccttgtaaggcaacatattcacacattccaagaattaggatgtagacatctttgaagtggtcattattctacctaccacaccacctatcagtgcctcattctacacggacaaagtcacaggttaattgttctatatttgacgtaactctaagttctcgtaagaaatctcaaacctgtctctaaatctcctctgttttcatctaaagattttgttagtgtatatctttgagcattcagaagtagacagttgcaactacaaattcatttcatctgttccacaatggtttggttacattgaaggattatttaacgactctataacatcctagttatattttctgagaaatttatggtccttatcgggcctcaatcaaatgtcattcatgtcttatttcacatgtagttagaaggggagtgtgtgtaaaatatggccatgaggtgactcttgcagtatctttactcatcttggaaacagaaaaaatgagctagtttcataaacttaatttctttacctcttcagttttctctacctgaaatattgaggcttctctttaactcatcttttaaagcacagaatttcctaaactttttaaaaattaaatgacttttcctgattttgcagttttcttttcccttcatgaacgttatcactgcagaaaaagcaacgcttgtactttcaagactataaaataagcccagtttataaaattattatttggaggctaaatatggaatttcagatactcactctgaaccacaaaaaaactgaaattagcattattcttggtagctgtattctctgctactgtatttccttattgttctatgtactgtgctctacttttgaaactcccagtcagtaggaaactgctctatgctctcagataaatatactctggtgaatgaaatgtaatggaccctttgaaaaagtaaatacttaatgtacacaaagaaggtggaaatgacatttggattctctaaagtctagcagttctcaaactttctggcctcaacatccctttacactctcaaaagtgaagggcctcaaagttcatgtggattgtgtgtactgatatttctaatattagaaaattacattgagaatgtttaaatatttattagttttaaaacgacaataaacacattaaaggttagcacaaacaacatcttaatgaaaatttactatattttccaaatcacaaaacttagaagagttgcacaattttaatttttttttttttttttgagatgaagtctcactctgtcacccagtgtggagtacggtggcatgatctcagctcactgcaacctccgcgtcccccattcaagtgatcctcccacctcagcctcccaagtagctggagttacaagcatgcgccaccagactgggctaatttttgtattttttgtatagacgggatttcaccatgttggccaggctggtctcgaactccttgcctcaagtaatccacctgcctcggcctcccaaagttctgttattacaggcatgagccaccacactcgatgtaaatatttttatctctttaacatacaccctagtagaaggcagctagactcaccagagaattgcctgcttgtaaatagtttttctactacatttagttaaaatgctcttctcaataaactatcctactatatatatatataaacacacacacactgtatccctacataaagctgagggttaccgagaataagtcaaatgtattcattaatgtcaataatgaattgggtgggagtggatttagacagaaaagaaataaaaacaaagggtatatgtatatcaaatcatcacactgtacaccttgaatatatacaatctttattgtcaattaaatattgttttaaaaaataaaggaccagaagctgaatatagttatagaatgcagcaaatgatgaaaacaaaagtgggagcaaagaacaagcctgagatgatcggtgtgaacttggctaggaggattccagattgctggatctgctgctaattgggaagcatgggtgaaaaaagcaattactttaaaaacaagcccatggccaaaagttttcaggacccatattttcaaaattccagattccatgatttttaatcatgtttaaataacattaatgcatgttaatatcttcttgacacaatgtttttatggtttaaataaaatgaggaactttaatgtagtcaaaaaaaaaaactgttctaccatatgaaacttacatgtggaaacttaaagatcttttgaaaatcaggttttatttttactggtttctcctactattaatccttttttgcctcctgccaaagagtattctttgtcttcttccactcattatgttattcatgcttatgtagtaaatgattataatttatcttacaatttccattaagttgttcttggatcacaatccccagggtatggttataatcccagggatgaaaggaaatggcaaataagatatcatgtgggcacaggttaaacaggtacaacaattaattccaagcatatgtacagaaggatagctatgacagttgtcaacaatggttatgaccaaggaaaaatagaaagtattatggtgtggtttgaaagatatttgtccttaggaaagctattaacaaaaataatgctaggtaatagcaaaaaagggtgttaaaagtaaatcatacaagtctgtcattctttattcaaaacggattcataccatacctagaacactgtgagcaactgtgacctctataaaggcatagccaaactggatgaaatccaagaagattaactaaaatgcttaaaagaatggagtggtttctcaaaaatgagagattaaaaaaaggaaaggttatatgtgtaaatgaagactgtcttagttcaggtagctataacaaaataccaaagacagagtggcttataaacaacttagttctcagtatcctggaggctggaagtcagggtgacagtatggtctggtcctggtgagggccttcttccaggttgcagactgtcatcaacttgttctatcctcacatggtgaaaagagctggggagttctttggggtcccttctataagggcactaatcccacttatgagggctccaccctagtgacctaatcgccacccaaaggccttcattgtcctaataccatcacactggggattaggatttcaactcatgaattttgaaggcacacaaacattctgtccattgcaaagtctttgaaatcacaaaaggtatatgtagaatacagagttaatatggaggcaaatttagagttgtttatcaaatctgagaattctcaaattaccttccattgtggaacccaggagtggcacaaatttaaaatataagtagattcaggaagggcttagggtaaagtcatgaatgagagtcataatataggatggaacttcggaatgcacttctctagtatttccaaccggctgttataaaagacaaccaagtctactgttaagaaaatgtcccttggtgctgtcagatagaaaaatttcttatatccttatttatataatttaaatacaaagattatcttatgagggtcccttgcctttcccatccttctgccctataaaaaagattctagcttttccttgtctgtcttcctttcttccaccctctaaggagctcccacctttgccagactgaccctgtaaggctttgtaaggcaaaatcagacagagggcaggggagaaaagcacaggaaactagagggctggggcgagaggaagagattttcccaggtgaagggcacctgaaaataaaagtctgggtataactacagagaatatgcatggaggatgggagaggagtaaaaaagaggatattagaaagcattgcttttgacagatgtaaaggatttaggttactttgaagctaattttggtttcagtgctgtgttcttttgaccatgatactgccccagacctaaccacaccagtcaagggtttacaaacattcccatgtgggctcatccaataatactctttgggattccctgttaaaacacctagaattcctacttatgatttctgttttaccacatgacacttttcagaagaaagtggttaaataagctccttggataacctcctaagttaggtaattggagcacagggaagaatctgtcatcagatgcctttcactaagttaattacagataaaaccaacacgaagtggttagaagcaaaggttaaaatttcactcccttggactttgtataataatgaattaaactgctggactgcattggcatcctgttgggaatatgatttggaaatagaaaaaccagccaatggtggtctaattttgttcttgaaagtaatttaaagtaacacaaacccaccaagactttacctcttttttactttaaaatgctattcgtgattttaaaaaatggtgcagatgtacaaaagaatctatatgcttttcctcaagtaaagatactttctccatatgtgtgtggaccacaaatcacctaaatactttataactcaggcaccatgacagcatttcagtgctgtttcatttctcaaaacattaaatcctccacaaatccagaaatcacatcaccttaaaaagcagccagtgctggggagtgaggaagaaggagtaggagtgaagagagggtgcagtggagaatggaatgaaatatatggaggatggaaagaaaaggatcagttattttcttttcttcaataggaaagaatcaagtgatcctgtctcaatgaatatgcttcatgtatagtatttttgctattttttaaaacttcagaaaacacattcctaaatgaagatcccacccaaattccaagttcttcattaatcaggctttccattacattgttcatgagaaaattctccttttttaaactacgtggtttaatgcctcccatattccataagattttataacccgtcttttctgctggtggcacctatatgctaaaagttgtcaagctccagagccttgttattttttactttacttcttctacatctactataaatactagatcctgatttttaatatgttcaactattaaaatatattagctagaaactctaagtacttttaattaaaaaataaaaaatccaagtccctacctcctacactcccttcggataatatcccattttcctttccaaatactatgtcctcttaattattttggaggaggaatgagacgctttcattattgtatatgagcaataaataagaaaatattctatctatatgagggctggggggcattgcagacaccattagtgccttttcaacatcaaatatctgtgtatctctgcttgagggggccctctggctgctgaagtgaatttggtccaggccaaaccaggcaagaagtgctggggagtcatggttcctcagaacagccctcaaccactgcctgatgtgagaggatgtctttttcagtttgggctgctagaacagttggggagcccaacttcaattagagggtgtgctcacaatgtttagtgatagagaagaggcaaaaaatgttttagaacctgttgatctagaggagggggctgataggaacaatttaattcaagtctgtctgtgatataaactcacataagagcaaagcagcttggaaacaatttgacagggatccagaaaagcttcagaggcagtgacgtttcaaggaggctttgaagaattaataggattcatctcggcagaagtgtttagaggatatcctagcgagggtagcttaaacaacaaacatttatttctcacacttctggaggctgaaagtacaagatcagggtgcccatattttcgagctctggtgagagccctcttccgtcttgcagacttccattttttcacttgtccttacatggcagaaaagagggtgaggcaactctctgaggtccctgttataaggacactaaccccattcctgagggctccactcttatgacctaataacctcccccaaagcaacacatcataataccatcaccttggggattacatttcaacacaggaatattggaaggacacaaactttgagtccatagcagaggacaatctccccagcatctttgccttcagttgcacaactatgaggcatgttatacacagcctttgagaggtcccagcagaaaggatccctggttgcccaccaccatgatctggttgataattccccactccctcaaaagcacttcctgggatcatctcccaaaacagattacttacactcaaatccatatctcaggatctgcttctgggggaagcccaacttcaatcagagggtatgctcacaatgtttagtaatagagaagaagaggcaaaataagttggagaacttgttgatctagaggaaggggctgatgtgaacaatttaactttaattcaagtgtgcctgtgatataaacccacataagaaagctcagaaacaatttgacagggatccagaaaagctccagaggcaacaatgtttcaaggaggctttgaagaattagtaggattcagctgggcagaagtgtttagaggacatcccaggcagaggaaccaacaatcaaagccaagaacacccttgggggcaatagagaagccatgaagatgaggcaggaaagtgactcaagaccttggatatgatgttaattgcaaagagcatacatttcattccatagacattggggaagagaataaatgtttgatcagggaattgatacattacaattgtttagaaacctaactatgaagaaagcatatgaaattggttttttaaaataataagagtataaaatgtttgaattacttacatttatagtaaagctaaataaatgttttgactaatttacaccaatcatggcaaacctactatttttgtgtatatttgtttccatagatacatacatacgaatatgatgctctttcatgaatgaaaataagattttaggcaaaaggtacactaaggtttcagatctgtgaaatatgtctgcaagtaaataaggacaaaggtactctgcaaagtcagtacttttctggtattgccttttgcaatgaatggcatcaccacaggctgagtttccaatttgggagaccaggattcatgcttagcacctccctcttcttccactgccatatccagcccaccacaaagtcccatccattttacctcctaaatatctcccagattcctccacttttctccattgctcatgccatcacccagtcacagccaccatcatctctcaccgggaggacagcgagagcaaacattcacccttactccgccactctattaacagcacagaagctcatgtctctccccagcttaaagccctgcattggttcccactgcacttaggataaagtgaagtggcctctgcccacctattccgcgttgactctcaggcctccctcactcattcttgatgctccagccacaatggccaacctttagttccccaggaaaacctgtgatccccaactgggggctttgcatgtacagttcctcttgctaggatgctctttccccaggcccctccttctttactcatttaactcccattcctcctttgcatcctagcctagtagcactttctcagggaaccttccctgtccctgggaaccaaaccaggtctccctattggaagtttgtaaccttctgcgcttttccttttctgtctgttattatctacctacggacccatgtgactgtctacctccgtctttagaccatgaactctgtgaagatggcacatagcaggggcttaagaaataagtgtgtgaagaaattatttcaattatatgttaccttgcctcaggtatatggttcatcattttatatggccaatatgtacatatgcattctatgcacattatatacgcatatatagctaagaaaactcaggctgagagactcttaagttacttgttcatcaggaataatggacctggaatttgtccatgagtctggcttgagcagacgctcctgaccaacaccttgtactgtacgccagaataataggtaacagttatagagttgtcttcatgttaagagttatggggccatttttctatttctcaacattttattgtatgtcattgccttgatgcctcttccataaaaatagccttctaaatgatggataaatttttctaagctttgtcttacccaaattctaatgtattgtttgtgttcttagaacttttttccaggttagttatttggcttcccattgtatcatattatgtcattctagatatattatttctactctttgcctctgttctccttaatttttgcaaagatgcaataaattgagaaaatatgcccattgaggcctattaattttgctcaaaatatcactatcttcctatatagttagggtgtggagagtgttctgaaatatggtaggtacagacaatgagatgaggctgaattatacatagaataaagagtaggaaaaatcagctccaggttggaaacaatgaaaccagataacacttcaggttaaaggaacaaacatggttaaagaaacaaacatggttaatgagtgtctactgtgacaaagagttgactaatacacagaaggccaaacataatcttcatttttaaaaatttaaacctttgtttttgatttggggtacatgtgcaggtttgtcacgagtatattgcatgatgctgaggtctgggatacaaatgatctcgtcacccaggtagggagcatagtactcaataggtagtttctaaacccttgctctctctcccctctagtagtccccagtgtcaattgttctcacctttatattcatgagtacccagtgtttagctcccacttataagcaagaacatgtgatatttggttttctgttcctgtgttaatttgcttaggataatgacctctagctccatccacactgctgcaatcaatgtgacttcattcttttttatagctttgtaacattccatggtgtatatgtaccacattttctttatccaatccaccactgaagggcacctaggttgaatcaatgtctttactcatattaatagtgctgtgataaacatataagtgcatgtgtttttggtagaatgatttatattcctttgggtatatatccagcaatttgattactaggtcaaatggtaattctatttttagttctttgagaaatttccaaactactttccacagcagctgaactaatttacattcccaccagcagtgtgtaagcattctcttgtctccgcagccttgcaagcatctgttatttttttttttactttttattaatagccagtctgactgatgcaagatggtatctcattgtggttttgatctacatttcactgatgattagtgatgtggagcattgtttcatatatttgttggccacttgtatacctcattttaagaagtgtctgtttatgtcctttgcccactttttaatagggttatttattttttgtttgttgaattaaattctttacatattctggatattagacctttgtaggatgcatagtctatgaatattttctcccattctgtaggttgtctgtttattctgttgatagtttattttgctgtgcagaagttctttagtttcattatgtctcacttgtcaatttttgtttttgtggcaattgcttttgaaaacttagtcataaactctttgccaaggcttatgtccacaagagtatttccttgattttcttctaccacgtttatagttttaggtcttacatctaagtctttaatctatcttaagttaatttttgtatatgatgataggcagtggtccagtttcattcttctgcatatggctagctagttatcccagcaccattgattgaatagacagtcctttccctattgcttatttttgttggctttgctgaagatcagatgattgtacgcaggaggctttatttctgggttatccattctgttctattgatctatgtatctgtttttgaagttgtaccatgctgttttggttaccatagccttacagtttagtttgaaattgagtattgtgatgcttccagctttattcgtttgcttaggatttctttggctatttggactcttttttggttccatgtgaactttagtttttctaattctgtaaaaaattatgttgatagtttgataggaatagcactgaatctgtacattactttggccagtatggctgttttactaataatcttctgatacatgtgcctagaatgttttgttacttgtttatgttatctatgatttctttcagcagtgttttgtaactctccttgaagagatctctcccctccttgactagatgtattcctaggtattttgtgggtttttttgtggctattgtaaatggaattgtgttcttgatttggctctcagcttgaacactattgatgcatagaaatgctactgatttttctactttgattttgtatcctgaaacattactgaagtcatttattagttctagaagcctcttggcagagtctttagggctttctagatatcaaatcatatcatgagcaaacaatgataaaagcatcctatatggatgcttcttatttctttctcttgcctgattgctgtagctaggacttccggtactatgcagcaaaactagacatcctcatcttgttccaggtcttaagggaaatgcttccagctttcatccattcagtactggctgtgggtttgtcatagacaactcttattgttttgtggtatgttccttcatgcctaattcttgagggtttttattatgaagggatgctggattttatgaaaaagcttttctgtgtctattgaaataatcatacagttttgtttgcagttatgtcttcagtttttagttgtgtggtgaatcacatttattgatttgtgtatattaaaccaaccttgcatcccaagaatgaagcctacttgatcatagtgaattaacttttggatatgctttgggattcagcttgctagtattttgttgaggatttttgcatctgtgttcatcaggaatatcggcctgtagttttcttttttcattgtgtctttgccagattctgctatcaggatgatgctgggtttgtagaatgagggaggagtccctcctccttgattttttggaatagtttcagtaggattgggaccagctcttctttttatgtctggtagaattcagatatgaatccatcaggtcgagggttttttaaggttgggtgtttttttactactgattcaatttcagagctcattactggtattactggtctgctcagggtttcaacttctttttgattcaatctagggtggttgtgtctttccaggaacttacccatttcctctagattttctagtttgtatacctagaagtgttcataatagtctctgaggatcttttgtatttctatgggatcagttgtaatgtcattttagtctttttttttttttttttgagacggagtctcactctgtcacccaggctggagtacagtggcatgctctcggctcacagcaacatccgcctcctgggttcaagcaattcttctgcctcagcctcccaagtagctgggattacaggtgcatgccaccacctccagctaatttttgtatttttagtagagacagggtttcaccttgttggccaggctgttctccaactcctgacctcaggtgatctgcccatctcggcctcccaaaatgctgggattacaggtgtgagccactgtacttggccatctagtcatttctgattgtgcttatttggatcttctctcttttttctttgttagtctagttagccgtctattgatctcatttatcccttcaaaaaagcattttggttttcttggtcctttgtatggattttggatctcaatttcattcagttctgctctgattttagtcatttcttctgttctggtagctttttagtttgttcttgtgtttctagctcttctaggtacaatctgaaattgttaatttgagatctttctaacttcttgatgcaggcatttagtactataaatttttctcttaacactgcttttgctgcatccagagattttggtatgttgtgtctgttttcatttatttcaaaaattgttttgatttctaccttaaattttgttgtttactcaaaagtcattcaggagtaagttgtttaatttccatgtaattgtctagttttgagagatcttcttggcattgatttctattttattccactgtcatctgagagtatgcttagtatggttttttaaattattattttactgagacttgctttatggctgaagatgtgcttgatcttagagtatgttccatttgcaaatgagaagaatgtatattctgtggctattggctgaagtagtctgtagaagtctattaggtctaattggtcaagtgttgaatttaagtccagaaattctttgttagttttctgactcaaagatctgtctaacaatgtcagtgggatgttgaagtctctaactattactgtgtggctaagtctttttttaggtctagaagtacttgttttatgaatctcagtgctccaacataatctccactttaaaaaaaaaaataaactgcttgagatttatccaaaggagagttatgtgaaaacagataagcttatataatagaatcactacatattttaaatatgctgcatttttctcaataaaatcagaattatttacaacatatacatatatttttctttgtttcaaacaaagaaaattgtttaacaaaagagataaaaggtgaggtcctaatgaattcagaaaatccagtcaacctgattcatgataagacaaaagagtagatgaaagtatcaaaaattcttgcaaaatctgtcaatgattgtgcacagcaagcttaggtatgagtcaaggttaatgtcttcactcacaatcttatgcttttatcccagaaaaacctactcatgccccacaaagccagtccccaaaaaaggcaacaatgggcgccacagtccattcacccatgagtcctggccttttcaatttcttcctggctgatgtctggctcttatttctatgccttcttttatgggctctcatcttttgacttcatctccagcccctgtgggagcattgcaattgagcatcattatgctttgggtttatctgcttttgccttttgccaagtaggggcattgctcattttctggctctgtttacagttgactctgcccaactgatatctttcagatgagtccccacccaaatctcaccttgaattgcaataatccccatgtgtcaagggtggggccaggtggagataactgaatcatgggggtggtttcccccatactgtttttgtggtagtgaataagtctcacaagatctgatggttttataaatgggagttctcctgcacaagctcactcttgcctgccaccatataaaacgtgcctttgcttttcctttgcctttgccatgattgtgaggcctccccagccatgctgaactgtgagtccattgaacctctttcctttacaaattacccagtctcaggtatatctttactagcagtgtgagaacagaataatacaccaaccaagctctatgatacactcacttggctgttccactccctgggagtaggagtgggcagttcaccattatgaatatccaagtgacagggtttgaaggaacccagtagcttctcagctgcccacccaaatacacggaaagcatctcttaacatgcaagtgttgacgaaaagcaactcagcttattctcattattcagagattcacttatttgtaactccaaaatcaattctctcagtgctttcatggccattcacagatttgcatagaacaggaaaaaagtctgagtcacttgccacatatattcccagctgaggttgaacaaggcaacatgctgccttcttgtttcagtggacatactgtaaaacaagtgtccttttaactgtctatttactgccctgttttttacatttgtgtgcttcggtttgatgatttcactgcttaaaaagttcccaagcacagtgctgaagtgttgtctagtatatgtgttaggcaagcttcattcaaacctgagctacagtattgttggccatgagttcaatactaacaatccaacaatagacagtaaataaggtgattttaaatagaaacacacataaggtatgtgatgatcagatagtgaacatactgtgaccagaggctcctgggagcataaccctgtatttcccctaggagcaatggttcagtatttgctaattcagtgtttacagtgactttatagaagacaattactatgaataatgagaatcaactgaactgcatcacattatggtcctggagtatgaataggacccagaacagacagtaatgttaaaatataagggcctggggccaggcatgatggctcatgcctgttattctagcactttgggaggccaaggtgggcggatcacctgaggtcaggagtttgagaccagcttggccaacatagcaaaaccccgtctctaataaaaatacaaaaattagctgggcatggtggcgggcgcctgtaatcccagcaactcaggaggctgaggcaggagaactgcttgaacctgggaggtggatgttgcagtgagccgagattgcgccactgcactccagcctgggcaacaagagcaaaactccatctcaaaaaatacatatataagggcctggatggaggttttgatgggctccaccgtgagaaactaagaaagtgtcatgcgaaataggagagcactcaactggagctggagaaacaccagacaaacttgtacctcttctccatacttcttgagcccaaccctattgctatgtatatagtattagtaaataatctggtaataatatcacacaaactatccatggcaaaagaggtattatcttaggattttacacttaatgtttgacagtatggattgctactgctcagtatagtagctaccagcaaaagtagtcactgagtacttgaatgtggctagtccaaattgagatgtcgatttcagacacagtatgataaaaataatgtaaaactgcttgtgaatattttttgagacaggattttgctctgtctcccaggctggagtgcagtggtgtaatcatagctcaatgaagcctcgacctccagggctccatccatcctcccacctcagcctccctggtagctgggactacaggcatgcaccaccatgcccagctaatttttgtattttttgtagagagaggttttaccatgtttcccaggctggtctcgaactcctgggctcaaggtatcctcccacatcagcctcctaaaatgctgggatgacaggaatgagccaccacgcccagcatgaataatttttctattgattccatattgaagtatttttacataataggcattaaaagtattgaaattaattttatctttttttaaccttttttaaatgtggccactagaaaacgttacatggcttatatggactgcattgtgtttgtattagacagtgctgatttgaaataaacagctgaattgggaggatttatagtaagaatttatagtgaaaatagtgaactagaccaccatataacagctatacttacatcctacttactctgagccaggcactgttctaagtactttacatatattactaattacatatattactttacatatattaacttgactgatcctcactggaattctcagggatagatgctattcattttgcaaatgaaaaactgaggcaaagaaaagtgaagtgatttgccccaggtcacactagatttgagccagatttgacctaattaatatagctcacattcttaaccatcacacacacacacacacacacacacacacacacacacatacacctatttgatgcaatcatcaaacccataaaataaaaattacttatcagtaaatagaaatcatagcttatgcctcagttgcattctctgaagatataaaaagaaacagacatttttataaaggaattaacttccaaaagttttgcaaggttttgcaaaaattgagccaccatgaatgtgaggatattgtgttgtcttccatctagatctagtatagaaacgcaggtcaaaaggtaggaagatagagtaaaaatataccgattttactggttaaaaaaaattgataaaagagaatacaaaaaaatttaaagggggatttggggataaatattagaaaaagaacttttcaaatgagaagagatagcatacagtgaagtttgcagatgaactaaggtgctaggtaaatgaagaaccaagccagcaggaacaggagtccgatggaagaggcagaaatgtgctaaataaacagacttaggatttgtaaaacaaaactgcttaagctgaccatataaagctgcttgtttgttgtttcaaaaatcaattgaaaattatttgagagagttgtttccatttaaaaaataatgattatattcacttattagcaaaggacaatgacctggctcctgtgctggttattcctgggaagaaaggcatccataggccgggcacggtggctcacgcctgtaatcccagcactctgggaagcagaggcaggcggatgacctgaggtcgggagttcaagaccagcctgaccaacatggagaaaccccgtctctaccaaaaatacaaaaaaattagccgggcatggtggcgcatgcctgtaatctcagctactcaggaggctgaggcaggagaatcgcttgaacccagaaggcggaggttgtggtgagccaaggtcgcgccattgcactccagcctgggcaacaagagcgaaactcagtctcaaacaaacaaacaaacaaacaaacaaaaagcatccagaaaggccatgagaggagcctgactctcttttatacctgcaggatctgcatcttcagaactccatacaggccttgtagatttcttttattaaaaaaaaaaaaaatagagacaagtctctctctctgttacccacgctggagtgcagtggtgcaatcatagctcactgcagcctccaactcctgggcagaagcaatcccctgcctcagcctctcaagtagctggcgcctacagttgcacactgccatgaccagctaatttttttttatttttattttgtagagacagagtcttgttatgttgcctgggctggtctcaaactcttggcttcaaaagatccttccatctcagcctcctaaagttctgggattacaggcatgagacactgttcctggcctagatttcattttaaaacactgagaacaattagtctacatgtcactgcacacttgcatggagacaactcctctgctacacagggaagcctggattagtagcaggtgttgctgaaccgcatcaccagcctgggactcagaaaacctgcattcgaagtctctctgttacttattaccctggggatcttggcatatcacagagtttccaagggctttatttctaaagagaaaagatggaacaaaaggaagaagtttacacagagattaaaaatctaaaacagggctcagattcttgctcttcaacttcaagtttaagacgttggccacattacctcttggagcttgtttcttcatcaataagatgttgataatcatccccgcctcatgggactgatgaaatgaaggagtgagatcatctttgtaaagttttagcacagtgtttagcctggcacgtactacgaacccaaaaatgattttttaaaattagatgataattcagcttctttccagctcagacatgctatgaagatacgcagccagcactgccttgccatggtgtgtctttttttctgactcaagcctgttccttattaaaatgctgcaactttgtggtgagaaaaggagttattccgtaactttgaccatcagaaagtgaaccaactgacaccaaggcctcagcaatgattctaagtattaagagttgctttcatcttcacagatggaagaagtgaggacaatacttggtcaaggtcacacacgttgaggaaccacccaagagagatcagaaactcaatcccttcctcaagcccttggactctgtttgctaattacttgtgagagttattaacgtgctttttatttttctttaattttggttttcttcatttatggctatcaacataatcccttgctcaaagctcaaggctaaatactaggtaaggctcatattctcactggcagaaacctctgttttaaacacttctctaaaaaatagaaccttgtttataagctttataccattgctgtaaaatgtaatatgcaaataaggcattttataactttagagttaaataataaaggcagcactccaaacctcaactagatatttacataattgcattactagcatttgcatgagctgtaatgaaagctaagggggaaaacctgcttatttcctattaactccataatagaacatgatttttatttgctcttacaaataaaacttaactgcttgtttgtttgtttgtttgttttttaaccagacgctacatttgggttccttatagttcctgattataataacagagcgccagcaaatttcataagaagaaaaacctgtttgatgaaaaattagttattccaaaagaattcccctaaacatctgactttagtatgcctctgcatttgctttctggcttttgacagatcagcttcttcactacatgtatcaggttttttgtttttgtttttgtttttgttttttgagacagggtctcactctgtcacccaggctggagtgcaaaggcatgatctcagcccactgcaacctctacctcctgggttcaagtgattcccctgcctcagcctcctgagtagctgggactacaggtgcacaccaccatgccggctaattttttgaatttttttggtagaggcggagttttgtcatgttggcccggctggtctcaaactcttggcctcaagcaatccgccctccttgacctcccaaagtggtatcacacctttttaagattaatttctttaaggtcagttttccctaaatctctctatgtacactcagtacagaggaccagctgatagtcctgacttccatcctgattaataagtcaatcaatgttgttgggtgtccctagagccaacctagcatgcacccaataaatgcatgctaaattgtattgaaattaaatctattccatgtaagtaagtgacttatggcacatctcttggttttgatgtcccccaaatacagattctgagatagaagctgggtgcaggtagtttatttgggagataacctcagaaagcacaggtagggcaatggagaaagtgagactaggaagggaggtaaactaaaagggatacattcatgagacaggtaatcactgcagacaactgagctgcaaactcagagtgaatactgggaggaaacacatggagggaacttgatgaaatctcaggcatttctcccccttagccttctcctaaccacacatcaacagctttccagggataccagacaagagtgagggcttaggtgctgccaactctcagactgaactctgcaagttctatcatgtcctgactcagaccccagttactgtcagaagcaatgctctctgccatccgcagtccagattctcaatctcatttcaagtcttgcttttaaataattctggatgatttttataatttggtcttcaatttgtctatttttactcatctattccctaaaataatttcaaaagacattgtaccccctagcacattattaggttgacatctataggctttcttggtcatcagtttaagtagttgctaaaagtgacttccagtaaattgtaaatattgaaagtctaaaataaaattgttactcagatccttcaaatgtttccagtggaatttaaattccaaagaaatgggatactcatcactgttcacttaacgatataaatgtacatgcttatcttgttttataatgttccttaaagtcatatttccattccattttccccacagaactttattctaatacaataatatacttgaaataatttaactaaatttaactaaataagaatttaactaattattaacataattcaccacagaaaagggtataaattaacattttttaaaaaaggtcctttgactatataggttcaaatgtatatttttaagttttatttggggaattaccatactatgttttacttagttcacaactgatcaaaacaatacaaatatattttaaatattaataaataaacttaaaaatttaaattttaatggaaaatcatctcaatgaaatgggcgggactggtctgatttttctaattagttaatctctccatgaatgaatactatttatcaatagaatgagacagaggttaatatcaatgttgttctttgtttaaaaaatagcactgaaaagacttgtccaaaaagaatttatttaagtagttgaaaatagaatcgattttattatagcagtgtctttcacttctttgagattttttagagttacatcctaaacatagcatagtagtctaccgtcaaagattattttcaggccaggcacagtggctcatgcccgtaatcccagcactttgggaggccaaggcctgtggatcacttgaggtcaggagttcgagaccagcctggccaacatgtcaaaaccccatctctactaaaaatacaaaaattagccgggagtggtggtgggtgcctgtaatcccagctacttgggaggatgaggcatgagaatccttgcaccactgcagtccagcctgggcaacagagtaggaccctatctaaaaaaaaaaaaaaaaaattatttagaatatcctaagtaggttttcaaactttattctgagcaaagaataaaaaatcattgtaaaagaatgtggtccccagttatcagatcaattagttttctcaatatcagtactagttcacagggtccctttgcttgggtttttccaccatagcaagataaggagtgaatcaaaggatggaagtaggaacatgaaaagggcaagtgtggggagaaaaaataagcaagaaactctgcaagtcataagggtgcctatggagagatgagtctgagaaaagcaaatataggggatttgaggatctggaggttgattttgttgacactgtctcagtccccacgtattcccttgggaaggagatgcatccccaggacacccacacatttacatacacttcagtggctttggaataattgtatggtcccaaagtctttcttagttttgccttatgaaattcaaagcccaagcgtttgaaacccaaaaactaagaatcaactctttggtttggttacatcatcctcaggagaagttagtaaaacctaatgcccaggcagctgcctggaaaggagggaaggatagaggacaaatagtttctagcaacaaaaaatacattagctaacctttcaaagttgcaccctgcgtgctcaaaataacaaaggagccacatccattatggatgctatagaattcatgaagtgcaatcatttgatttgggcctttagtttgtagatttaagatttattggagaagaaaagaagtgcatataatagattaatttgtggggatgttaaaaatgcctgtgcatggacttattagataacctgcaatgcgtaggtaaatttgatgttcaaataggaccacttgtttataagcctgatttctttgggaagaaaatcaattcagaccagacctgtttcattcaagtaagcctgagggcttgcttgaaataaactgataaattcttctgttcccaattaaaaaaatagggccaatatccctcattttaaaaatgcttctgtttttcatgaagtgtgtgtatgcatacacataataatctgaagcagtctgctgctatttaattatagcaatacatgtgacaatggaaacagagattggagcgattcagggccatgagccaaggaatgcagggtgcaattttagcccagtgaggcccatttcagacttgggacctccagaactagaaaataataaatttgtgttgtcttaaactctaagtttgtggtaatttgctacagtggcaataggaaactaattcagtgccctaataaaatgacatgcctttacaaattaactatgtagacacatcccataatcatcctacattaaaagtatttaatgtcctctaaaataaaattccattttaataattatcacctatgactttggattgccctaaataatctaatacagatatgaaaatgagtgtatcaccaggctaggcccaaaggaaattgacagggctgagcagtagaaatcaggagttattagaaatcatggggcctccctaaagggtgggaaatttatcaactgtgcttttctttcctattcaagtggttatgtttgcccagaaatccatgaacatggaagaactcttaagtatgtcttcggtaggcaaatacttgttttcttctaaactcatgatgtagagggaatgattaaaagctacagaccacagggggtggaaaagtattagcttaaaaaaaatggatccaatccaaatgtcatgggccagcttgaattttggtgagcctaatgatttttgaaaaatgtctgttaaaactgttctccatgccaagctccagggtaaaaccacaagtaggaattgatctgttgtattttataaaatccaaatgctgtttttctgatttaaatacttttttaacagattctgaaataggacacaagggaagaaactgaagacagtacattttaatcttctcaagctgccaggacacagatctctccctctttccctacagaagggatcaagcagtgcccactctccaccctccagggagctgtgactcctggtgaggggctattcatacagtgtccattcccagaccatgctttaaacatggccaggaacactgaagctttgggactgagagtgtactcatttagtttccctgaattgagaatgcatgagaaaaagcaaagggcacccaaatacttgtggccttattaatgctttctggaaagtctttaattatttaataatcttctaggtttctctgtctctacttctccccaaaataacatgggcaggtgcgaaagcctgttgttctcctcttcaagtaacctccaaatttagttgctgcttaagccccaaaattcctcctacgctggctttgcatgcacttgagatgttcatgcctgagatctaggccttgaatgggaggggttttaataggagcaaatggcaaaaccaagaccgtggcctagaaaatgtttgtgaatgggcttagaggtaaagggacctcaaagcacataagcctctgccaagtcctatagcagtgcctagaaagagcgtgggcatttttgttgatagcagagggactggaagagcactgtctcaggcaaagctggatcccaactatttcacttgcagaaatgtctacggcaggggtgtccaatcttttggcttccctggtccacactggaaaaagagaactgtcttgagccacacgtacaatacactaacactaacgattgctgataagcaaaaaaaaaaaaaaaatcacaaaaaaatttcataatgttttaagaaagtttataaatttgttttgtgttgcattaaaagttgtcctgggccgcgtgtggcccacaggctgtgggttggacaagcttggcctacagaaattcttgcaagaaactaatatctatggagagttttcacgttgaggtttttagaagacgggttgtcgagtgataaacagcacaccactcccttgcccagtttttctaattaaaaaataattgggaaataatgcaaaacacacgtggagaacaaactgtcatctttacgacccaatatagggaaggtcagagtatccacttacatctgaggggcaaagggcttcctcagactgaacacgagattagccagacctacccagctgtactagttatctattgctttgtaacaaaatccctcaaagctaagcagcttaaaagaacaaacattgccgggcttggtggctcagacctataatcccagcactttgggatgcaaaggcgggaggatcacttgagtccaggagttcaagaccagcctggggagcatagtgagacccccattgccacaaaaaaaaagttttaattagccaggtacggtgggatgagcctgtagtcacagctactcaggaggctgaggtagcaggatcgcttgagcctgggaggtcaaggctgcagtaagccatgatcacaccactgcactccagcctgggcaaaccttgtctcaaacacacacagacacacacacacacacacacacacacacacacacatttctcacaatttctatggatcagggatctgggtacggcatggcttctctggctcagggcctctcaccaggctataatcaaggtgttggccaggctgtggccacctcaaggctccactggaaaaggacctgcttccacactcactcatgtggctattggcaggaattagttcctcacaggctattgaactgaggcctcagtttcttgctggctgttagcttggagacgtgagtccttgctatgtggacctctccatagggctatttagaacatggcagcttgcttccttttatagcagggctccaagacagcaagaaagagaggactgcaagccagaagtcacaatgttttacaacctaatctcagaagtcatatctcaccacttttgccacattctgtttgttagaagcaagtcactaagtccagccacattcaagaggaagagattatacatgtgtgtgaatattataggggcccttctcagaggcagcccaccgtgacagacaagtcaagcagtgctctgggaggattggaggcctccctctaccccatcccagcaggaaaaactcacgctccctataagaagcctgtccatgggtgaaatgacagaggatgggatacacagcacatgctgtgtcatacccatcaattgcataaataaatcctgaatgagggaggaagtggtggagagaggcttaggctaaaaaagttgggggaagggagaagagggaaggagcagatcttttcaaatcgaaaggagcattagtagtaagtaatgagaacccgctaattctcacaataccctgtttatattatgatactcaatttacatataaagaacttgaagcttatagagcttgagtaacccaaggtcacatagatactatgtaatggagctagaatctataaatatccaatttctgaaaaagtgccatattctgtgtaataattatacgtcccatactcagaatctgttggaagcagctatctgatgaagacatttatacttgcccatgaaaatatcccatttcaggaatgatgctgccccattctctctgtgtccttagatgtcccctaaatctaaagttttatgaaacaatggcttggccaggaaacaaaatacacacctggcttagaagtgagcagttgctcacaggaaggggaacatcacactccgggaactgttgtggggtagggggaggggggagggatagcattaggagatatacctaatgctaaatgacaagttaatgggtgccgcacaccagcatggcacatatatacatatgtagctaacctgcacattgtgcacatgtaccctaaaacttaaagtataataataaaaaaaaaaaaaagaaagaaatgagcagtcccttcatgacatagggctagagagaaaagagaagtgagcagtccctggagccacctgcaagctgtctgggaactctgcagagcaccctaggactgcacagcctgtgcctgcagccatgaaccttgccagtagctggtagcccacacagaggtggtgacatgcaaggcaacttgtccagagtccctgggtggtacgtgtcactcctagaaacctagcaggtcggaaaagcgttgctttgaacttgagacaagatacttgctttcatcagccacccagcctctcctgccgttttgttctaggacgcaggctaaatcacagatggtgacacttggcttcctgctgcctttgaggtacagggctggacaatggctatttctagccctacatgctgcatagaagtagaatgcccagggactatcgtctcttcaagatttcatgtcctgtgttaaagagaatgggaaaaatatttacttgaattgctgtatagttctatgtgtgctgtcacagttagtgttctttattaaatggtatttcagtgccactgtgtgccaggcactgtgatgtgtgctgagggtaactgatgaataaagcagaagcacacatggtctagtgtgaattcccaaagataatacagcatgtgctggcatcaagggatgtcccaggtcacatagcatctcctaggatggactgcatatgtgaaggggattcacaaaggcagaatactgtgggttgtggacatcactatcaatttccctctctgggacgcagttcactaagatactcttccctcgcccagaaaaaaagaaggctgtaggcaggaggagtggatgtaagcatgaaagggactggcaggggggccacaggtagggatgaaggaacttgtgtaaataatgtttcccaaggagacgacagaaaggatcaccagcatatatccagtatgtgcacccaaatcatctgagattctccactgctcagagggaaagactctgtctgaacaagaaaaaccttgatttctgctgagtctcagacctgaccattattcccttctcccagatgtctttcaaaatcctctgtctgcctctagataaaattttgcttgtcggtaatacccgggtacctccagaataaggactgtgcaatattgaagcttcactggggtcaacttgtgctctactcatcacgtctcccaaacaaaaacattaagaatgaccaggcgtggtggctcatacctataatcccagcactttgggaggctgaggcgggtggatcacaaggtcaggagatcaagaccatcctggctaacacggtgaaaccccgtctctactaaaaatacaaaaaattagccgggcgtggtggtgggcacctagagtcccagctactcgggaggctgaggcaggagaatggtgtgaacccgggaggcggagcttgcagtgagccgagatcgtgccactgcagtccagcctgggcaacagagcaagactccgtctcaaaaaacaaacaaacaaacaaacaaaaacattaagaataagcagcaatattgtttacatgaattgtgtggtcttccatttccctgtttgtagcagaattcctcttagataacattggctttttttctcagctaagcatccacaacagtctccagctgaaaatcccatcatgtaccctaaacatccaataactgcctcttcctgggacatacacgcaggtctcatgataaaggaaccagtgatgcacttgtggacctctctacagttgaacctgaacatgtatttcctccacccacaccttacattttgctcttccttttctctctgggtcaccaatgttttgaattaagttgcgtacccactccccccaaccccatttttttcacacacaggagttttgccccatgtaaccttttggtagcctgattgccaccctttgcaagccactggttttttttttttaataatagtttaagttctagggtacatgggcacaatgtgcaggtttgttacatatgtatacatgtgccatgttggtgtgctgcacccattaactcgtcactgtttagtcttcctctgcgacagcctctccccacccccttcccagcaacggcagcgctattgctgatcctttttccccttcacactaatcttccagcaatctccatccacagatgtctgttctatcattttttggttcatttagggatggagaaaagccattatcatctttcctgagagagggtattaacatcggatgccattgcagacctcctattactgaaatactatagcaatcaaaccttctaagtccaagatccctaatatccgtatcaggagttcaaaatgaaactgagccactcacatttgcttcacacacctgcctgattatcttaggaatataaagtagacagtagccccccgaagaagaaatccaagtttgcaaacaggctgagttcattgaaaacagtttagactccacacagagacacactgcatatatttataaatatacgttttaaactctgacagcatgagtacaccactgaaatgttttcatctttgttttttatatctgttgtctgccacggcatgtctgctttcaactataatcagaaatttggcaagacaatttttttaatattttatttataatttgcaatcatatttataatggtgaaaaggtgagttggtaaaataatttaccctgagctcctgatcatagaaagaagtttatataatgaattgtttttacatgaagtgtaaaacaattataaatgaattgtttttacatgaagtgaaggtgcagtgaggaactttgatatggcccatggaataatcctgattgaacccatgccagagctttgatcagctctgtgacggtgtgctgcctaagtacctcattgaaatgggtgggtctcatcatgagtcaacaaaagctttctatctgaagaatcatcagttccaacctttctaaatgtggcagtgtgcacgctcagcattaagacaagtttggtgtctgcttataaagacagactttatatcaatgagatattgctctgtaacaaaccaacccaaagcttaatggcccaaacaacaatcacttgcataactcatggttctggaggtcagcaagtcagagtaggataaactgtgtggttctatactcggctgaactccctcaggcatctgtgatcaactgtgggttggtcaggtggccctgcttctggaagttggccagcttcagtgggggctcctcggcactgcttcattgatctctcattccccagaaggctagtctgggcatggcttcttgatcttgccaaggttccaagagagagaatagaagtgtatgaggtcttttggggctatgttggttttctgttgctgcataacaatttctacaaacttagcaccttaacacaacactcatttactagctcatagttctgtaactcagaagtctagtacaataggactgggttctctaccctgggtatcataaggctgaaattgtggtgtcacctgggctaagtttttagctggaggctctgggggtgaaaatctgcttccaatcccattcttggtgtcagcagaattcagttacttgtggttgtaggactgaggtccctgattccttgcaggctgttagtgagaggccactttcagccactaaagatgacccacattccttatcacaaagctccctccatctccaagacagtcagggtatgtcaagttcttccctaccatatataaaatttgagcagctggggagatttaaaagaggcttcccataaactcagaagtaaaaagagacaagggtcccagtaaatacaaaacgactggggttggggaggcggattttctgtcctcagtgacgttttgttggttgattggtttcagaccttggactgcctctgtctctgaccactagactcagatttaaagaactcatgtgatgaggtcaggtctacccagataacctccctatcttatgctcaacggatttggaaagttggttatatctgcaaaatctcttttgctatataacataacataatgacaagagtaatagctcatcatattcacaagtgccaaccacagtgaaggcaaggagattacacaagagtaagggtcatggtggaattcagcctcctgcggaagcctgggcttgaccggctcattggcccttctaccccatactaaaaactaaagcagatcagcccaaatttaaatggtgggaaaacagattctaccttttgatggaaggagctacaagggcacattacaaggagggtagacacaaggaaggggtatagatcgacaccagattttgcaatctactacagacaggatatatgagacttaaaaaatccaggcagctcaatgccttatgatagctcttgctgcaacaaggtggcctgcagagagagcccacttctagttattaggatgagaatatggaaggacaagcaagaaatgtcaggcccacactgtccgtgaagtaggataacccacctctatttcctagctgctccacctcacaaagcctagctatctttgcctcctgctccttcattagtgcaatggaacagcaaatcaggatactttcacagttctcttaagtgagcctagaagtggggagctgcttgttcacaaacttgaagcctgaatatgttaatattctttcagtggccggacgcggtggctcatgcctgtaatcccaacactttgggaggccgaggtaggcagatcaacctgaagtcaggagttcgaggccagcctggccaacatggtgaaaccccacctgttggtctgtactaaaaatagaaaaattagctgggcatggtggcgcatgcctgtaatcccagctactcaggaggctgtggcagaagaatcgcctgcacctgggaggcagaggttgctttgagttgatatcgtgtcactgcactccagcctgggcaacagagtgagatcctttcagaaacctgctgtctgtatttggatacaattaaaaaaaaaaaaaagatgagacaggcaggtgcgaaagaaataaaagtcacaactgatccagttgggaaactcagaattgacagttacgtgtcctttcatttattgatattttgagattcacaggggtttaaactttattcttccaagactgaatagttcccacctcccttccatatataaaatttgagtagctggggagatttaaaagaggctccccataaactcagaagttaaaagagacaagggtcccagtaaatacaaaatgattggggttgaggaggcagattttctgtcctcagtgaagtttgttggttggttggttggttggttggttaattggttggtttttgagtcagggtctcactttgtcacccaagctggagtgcagtggtacaatctcagctcactgaagcctctgcttccagagtttaagcgattcttgggcctcggccccccaagtagctgggactacaagtgtgaaccaccccaccgaggtaagttttgtatttttagtagagatggggtttcaccatattggccagagtggtcttgaactcctggcctcaagtgatctgcccacctcagcctcccaaagttctgggattacagtcatgagccaccacgcccaatccctcagtggagttttatccacttattataaaatgtttttgaggctttagaggcagagccagagaaaacgagaattcaaaaatctgcctttttttctttagaagtgttgaaatcatggcctacttgtgttttaatgggttttcagagcttaattagtccatagactgttaaaaaaaaaaagaagaagaaaagatgagctgctctatgattccccagctgccttagaaatgtgcaccaagcttacgatgaaaatttgtaaggaacatatatttattttaaggattctcaagagctctggagaactgtgcctttctctacatacatcacttcactgctctcatatctcagttaagtgagctaaattcaccaagccctgcttaacttcacaagccaggtctgccagaactctgggaggtgtccattgctgattggcagctagccagtaatatacacaaagaatgcaaggatgagaggatgacctacgaagtaaagaatcatgttcagggagaaacacaggaaggggcaggttgggagcaaacactgaaaagccaattgcactgtgttttcatttgtttggagagggcattatgggagggctggaggattgtttcttagcttcttccaacaacagttagataattgctgcaagtggagagctcagaatagcaacaatttgccgacacatgagggcccctctttacatgttcatctttttggtcaccttccacttatgtatgtgttattgaagtagcaatggacactttgaactttctttctcagaaagctattagcttagctggtgttctgtattatttccacatttaagcaataaagcagtgtttctttgtaaaaatctgacttttttcagttaagtttgttgccagatctcccaaaaagacagctgaagtctattacatatgttgatcgctattattgggagaaggtgttggcaaccttttgagtgggctgtgatgttgccaatgtgtttttccaacaaggtaaggatgagacaagataaagggcaaggaagggggaaagggtgctgatgtggacacagagaacgtctccctcttgctgtcctccctctgctttccatcaaggtcaagtgtctcttgtaaacaccggcagggacagttcaatctgcccatctctgacacttgggtctccctttctgtgacccgggaaacagtcccacggagaagccaggaccctgggccttctccctgggggctctttatgcaggtcactgccccactccctgaactccgaaacaacagagcttacgtcctaggaaaacctcccagagatggctctagtccccaacatttttgcaattgcaacatttcttatcctataataatacaaaaacttccacatttaaatgcattcattcaacagaggccaacttcagcacatgcacttctggggcacttgtgtttacaatggggacaaaacaagacagttggtgtccgtgggcagcttaatcctagtcattttaatgcattttgctttcaattagctttctctgaataattctatgaccacattgaaattgtgagtgacatcctgaaatatacctacactggatcgtaaaccacagtgaaaaaaatatataaatatcgccctttccagaagctcatgtgtacttaaaatgaaaccaaaaaaacctaaattaggtattcacagatacccttttgagaaattcgcgagagcagcaaaagtacattgacatgcgtatttctgaccccatttgatgacctgaaacatttcctccctcttcattttctattgctgaaccacagtattttcctgtttggcacagatcaagaacacaggtctttctcttttttcgtttttcccactgaggctatgaaattggccattcagttattatagtaaggattagtaaggacatttcaaacacaactaattaaagaagtgttttctgaaattaagatatttttgtttaattacattagaaggaactaaatataatatggtatagataaaaatagacagaattactcagaactgagggaaaaaataagtagtgagaaaatgttaataagatctgaatgccatcttcgtggcatttttccctaaacttcatcagttgggagaaaactaaatcttcaatattaaaaacaagtcttatgagcaaaaattactgtccggtcaccctccagagcagggtgctgtctaaacagaactttctgtgatgatggaaatgttctctatctgtactgtccctatagccattagccctaggtgcctattcaaatttaaattaactaaaattcaataaaattaacaattctgtttttcagcgacagtagccacattttaagtgctcaaaagcaacacatggccagtgtctaccatattggacagcacagttctagaagccaggaaagaaggttaaatacacagtgaaaatacacacccaaggttttccaaacataagtagaaatgggaaatttttcccgaaagacctctatggagcatgagaagaaaggtctactttgtatcatctggaggattttttcctctttccatcaagtttcagccaataattaaaacaagttagcaatatttttcatcccaacaccttgtgtaaattcttgtcttcccccaaagagttcccttgatatgcgttttacacaccgtctatagaaaaagcactttccaaacacccagtgtatgtttttcatgtaaattcacttttctgatccttttagtatatttataatggaaattctctctacttaaagcctatctatatcttagcaaccacagtttccaaagctattccatgaagcaggtttctctatttacttttgtctatttgtgtagcccagaccacgcaataagattttcaaactggccaaaacacatgaacatagacaaagtcctttattgtgtgggtaaccctttggaatgtcttattccctatgagagctgacataaagcaggaattcaaatgacagtgggtcaaaacctgagggccaactgcagatttcagcctactttacagtccgttggctatcatagcttccatatgggcaatagtgattgtttatgaattaatccatgcaaaatatatcaaatctagttggagaggatttttgtgggagagaaaaggtacccttccttcaccagcctcggcttcatgctaaagtatttcacaactacagtgttttcataagcttagaattcaaatgaggccaaaaactatcaaaagcaacctgctatctttacctgacccagaagtttacaagattgaattcctagaaattattggctttattcttctggagtctgctcaagtctagataggcaagaaagaacctaacagatcaatgcctcttaagggaattgatcccttctgcccaacttcctgggcagagtggccttgagtgaaccatattcagaattagctcctgtggaacctgactatggataagtatgttaataaatacattacatttttgaaaattatgtaatgcatttttttggacacagggcactgttcataactgtatatatgctttacctctaatacaattactactataatttacttcctaagttggtttctgtttggttaatatacacatgtgttagctccaagataactgaagagcattttcatgctcaccaagccagctccaaaccaagcacaatcccaaatctgaactcttattcctaaagtcaaatcaaatcagatgggtcccatgggaagaaatgagatatgtccaggccaacatcatgattagacccatctccaatgtcacactcacaagtcagtttcctaacccactcaacccaacattttacctccaaaaaagatgacacaagatcatgcttgaaacatatggggaaagcataagcatgaagttttaaaaggcaggagagagaaaatgtgtgtattaggcattcaaacctactacagaaagaggtttctttttttaacttttattttaagattttaagttcagggatatatgtgcaggtttgttacataggtaaacttgtgtcatgggggtttgttgtacagattatttcatcacccaggttattaagcctagtacccattggttatttttcctgatcctctccctcctgccacccacaaccctccactaggccccagcgggtgttgttcccctctatgtgtctctgcgttctcatcatttagctcccacttataagtgagaacatgtggtatttggttttctgttcctgtgttagtttgctaaggatactaaggcctctagcttcgtccatgtccctgcaaaggacatgatctcattcctttttacggcagcatagtattccatggtgtatatgtaccacattttctatatccagtctatcattgatgggcatttaggttgactccatgtctttgctattgtaaatagtgctgcagtgaacacatgtgtgcctgtgtctgtataatagaatgatatatatttcttcctttgggtatatacctagtaatgggattgctgggtcaaatggtatttctgtctttaggtctttgaggaatcaccacaagagagagccttctttacagggaaagcaagcctgggtttgaggaggtgacggcaaactatcgctcaggaccaaatctgccacctgtttttgtaaataaagtattgttggaacacagccatgcctgtttgtatatgtattgtctatggctgctttcagggtaaaatggcagctttgagtagcttggacagagaccgtgtagcccataaagctgacaatatttactatctggatggatctgtacagaagaagtttgctggcccctggtttagagttttacatttgctgaaaacagtaattattgaacagtttctttacgtttgccacagagcaccatttgtgcctcggtcttaaagcaaccctacatctcatcactttgctgccataagttctgagaacaattatttctttgttaacatttggtaaacttatctctagggacataaaagaaggttgggaacatctctgaggtttaatttcaaaacacgttgagtttaacatggggattcaccaagtgctggtagctagaataatgatgcacttatccaaagacttttcaaggggaggttactgactagtgctttgtagtacaggccatgagagtaaacatgaaaaaaatgggcataattccttttccaagttttaatcataaatgatcatttttttaaagattccaataacttgcccactaagaaaaaaaaaaggaaaaaaaatgggggagggagataacgacacagtggttttgttctaaaacagtcatgtgcaatgtcatggtgccatctacagtatttcaatattttcacccaaacaccagaatttgaagaagccctatagacacatatctatttattgagggagaaacgtttttctagcacaacagtataagaaggctttaggctaaaattttctctgtggtcacggtcttctgtcttcttctcctatgaaccatttttaagtttattccgtttcctgacaacttcttagttcccattgtgatagtaaatattaaaattaatgaatgcgctgtacctggtaggagtgcaatgaaactgttcaaaaatgttgggatttagtatctgctcacgttcacacaaacacagtcactattgtcaaatgcgctgcagtggtggagtgtagcaacaggagggatgagacccaaaggtctgaaaagccagtattttaagaagtcttggaaaatgtggaggttgaaaaatctaacaggagtgcttgcttcagcagcaatttagagtagattagcatggcctctgcgccaggatgacatgcacattcctaaaagtgttccgtgttttaaaaaaaagagagagacagaatctaaggggatgtgtacatttgctagagctactataacaaagtaccagaggcagggtcacttcaacaacagaaatttatttctcacagttctggaggctagacgtccaagattaaggtgttgactgggttgaattcagcccataacaggaaataaggagttaaataaagcacttgcttctattgtttgtacctaaacttaacagaacacagtaagtaacaagtcattgggatgcagaaaagaaaaaagagagtgaaggaaggagagaaggtgaagggagaatggaagagaggaagggagggaggaaagaaaagtttgatgaatgattgcagtctaaactggttcaaacaagagatcttgtttaattaaggaattcatcccatctctgcctattaggaggaggaaaaagtctaaaatagaagatggtgaaagttggatgaccccaggcattaaggccattcatctttaactgttatgcttggatcatgcaaatgtgtctggtagctacaagggttgctgtgggtactgaatgttttattgttctgagactatcaaagaaaatagccatgggacatatagaccacagaatactatacagccatgaaaaagaacaagattgcatcctttacagaaacgtggatggaactggaggctgttatcctcagcaaactaacacagaaaaccaaatgccacatgttctcactaataagtgggagctaaataatgagaattcatggacagaaagagggaaatagcagatactgaggcctacttgagggtgggggctgggaagagggagaggttcagaagagaaaaaactatctgatactatgcttagtacctgggtaattaaatactctgtacaccaaacccctgagtcatgagtttacctatataacaaacctgcacatgtactcctgaacctaaaataaacattaaaatattttacaaaaataaaataaattaacaattaaaaaaagaaaaaaatgagacaataaatagatcctgggaaaaactgtccccagaagtgttcttttaaatttgcactacagatgtaatccaagttgagtaaaatagaaaagcatggatttgctgttcctgaaagtcattcatggttaattgccgaacactttcatctgcagtgtctgtggaagggtagaaccttaagtagtttttcattctctgactactcaactagaaaggcataagaggcaactcactctatgatatctcactgtttggcctctcctgtttcatagtagcaaaggatttttgcacttatccactaatttatgatttcttcttaataaaggaaacaagagcctctatttattatgattcctgccatgtgtgaggcttgagctgggtattttacatacattatttcatttgataatcaccttttcaaactcttcaaccacataaatgcattacagagagctattttagataaacatggttataaatatgtaaactatataaaaccatatgttagaaccattctgtttcatgcttttagaaaatcttactatagaccataaattaaaaacagtaaattataaaccaaacacttttatggggtttttttggtcttgcagttctagctgaaggaatactgcactttaactcacatgctgattaattttattcacaaattttgaattataaaatgtgtagagtcacagacaattcaattttttcaacacccattttcccaagacaataaccgaagtatacatacagtagccactattggcaaaaaatgtattcctcatttatggaaaaagtgcaaataaagaaaaattgctgtttataagcataattccaatgactgctgcgagtgggaagcacagtgattttgtgttagatctctaagagcttacaagatggaagcttgtggtgtaagcatttagtggtgcaatactgtcatctcgtggtcagtatgcagtatttcagatttagttggagaaaatgtctgaaaatcgttaacgatatttccagtctcctttcacatacttactccccagagagtctgatttgtacacatagacatgatagaatcggcttgttatttaaacaagcagatggatgttgtatgagattgttccaggagtttactgccttagacccggacgagaggggccctgccctggccccgtcagttagagggctcagctttgacctctcctgcctgtacccctctccacagatcaagaagtcctcggaaccaagaaaacgcccatccaaaaccaagcccttttcttccctttacctgccctctatctcacctcaccagcagttccactttcctgcatctggatgaatgctctaatgctctcacgttgcctgaggtttcatgaataatagctggctgccacttcccagatatcatttgcatttgagcagcttcccgacatataacacaccccttcccaacaataataatgatgaaaggaattttgaagatgcaaaaacagccccatggaataacttttctcacccccttcaaatcctatcccagcatgtatacaagaacatgtgagcactttccaaaccttagctctccgctgccaccttcaggacgatttcagtaaccgcagatactgcagctgcttagctaagaaacattaacactcccagacagagaaacctggctgaatcctgaaatagagccaggtgagaaaaaagtggtcggcatttagtttatggtatttagcaaaatcttgtaacatattttattggatactctatcaaataacagaataacaatagctaacaccatatataatgtagacatgtgtaagtaataaaaactgataaaacgttttgttttatatgtataacaaaactatatgaatataaataaaaatatgtatacatcctacagtaacaacagctgatatttatttggagctttttctgtggcaggcagtattctgtatacttcatcactgtaaatatgtttacatgttttgaaatgtctcaataacaacatgaggtacatactactcttagtatgttccttgcccgtgggggactcctgtctttgcagtgagtcagaagataatgacataaagcatagacatagcattgccctgcattcattcaacaaatatcaccgagcactgagaatgcagagatcagtaggacaagcaagttctttgctcacgaccatgtgtgcaggtagggagatgagcaacggaaaataaatatttttaagggaatatatgagtgataaatgtagcttataaaatgtataactatactggaaatcaaaatagggtgacgtgatagaaagtgactgagaggctatcatacattgagtggtccaagaagagttgctattaaagtagggccaatctaaaaaaaaaaaaaaactatatgatgatctatggagaacattccagaaagatatgaagagctagtgcaaaaactttgagaagggaagcatttcaacatacttgaagaacacaaataaggccattggcaggggtgagaagggaagggagagggtggaagagggagggctgagagccaaacacagccacagcatggagggcttgataagccagggctgtgcaatgaggttttttaccaggtgggaagagaagttcttaaaaggctctgagactatcaaaaagatcactccggctgctccatggagacaggaatttatggtgcagagaacgtagaagcaagatacctagtgagaaatcacgtgcaatatagaggctcaagagacaccacctttgactagcaatggaaatggacagatctagaagatccaggtttgttgtggccatggagtctacaggtgtacctgatgttttcaatgtggaacagaagggaaaagatgaactgaaagtcatacttagatatgggaattgctatgacctgggaggagaaagtttctgggtggcgagaagcaaatctagagttgtcctgcaaggcccggatggaggagcccattctgtcttcctgtttgaccgcagtccagctattggacctcatggagccctaatgtacttatctgtaaaaatgcaggagcaggttcctgccagatcagtttctctgagtctcgtgggatttaattgaagttgacacagaatgactttaaaaccttccaagccaatggctaatgatgaaaatacatatgaaaattaatttgggggatcctgtgcagaggaaaacaaaatagttctattcaaccctcaaaggaaatgtccagaagtgaagatgaagttatctttcagagttccaatactcctaccccactacctgtttaaaatggacttttatgttacataatcctgaaaatgttaggagtcaaaattcctctagataaatgtggtacacatataccatggaatactatgcagccataaaaagaaaacaaaattgtatcctttgcaccaacgtgcataggaaatcttatcctttgcaccaacatggataggacatcttatcctttgcaacaaggtgctttcagaagcaggatgagcactgcaattgaaggctaagaggaaatggctcttggccaatttaactgatcagtctgtaagaaattaaaaggaacataaccagagagagatagggtatctcttatgagaacatcagaggagcgtctatggctgtgtaatgttgacattctcttctcaacgtggatgcagctggaggcatttcctaaatgaattaacacaggaacagaacagcaaataccacatattcacacttctaagagggagctcagtattgtgtatgcatgaacataaagatggtaacgatgctgaggactactagagtgaggagagagggacaggagcaagggctgaaaagctacctattggctaccatgctcactacctgggtgacaggatcattcaaaccccaagtctcagcatcacacaatacagtcatgtagcaaacctgcacatgtaccacctgaatctacaatgaacattgaaaaatgtaaaataaacattgaaattatttttaaaacagaagcataagaatataaattaataatgatattcaccttttactataccttggtaaaaaataattatgagttcagtttaaaaagtcttctagataacaaaagtatcatactgcttttaaataaacatggtaggttggagtaagttctttttcatttggcagtgacattgctcttcacacaagtttccatcaagtattgaaccacttgggcttgattctttccctcaagttacttttgaaggagtctgtgaggtttggggattattgctgtgatatctgggttttctaaagaaaattccaggaaaccaaaaggatttgggacaaagcatacatgaacaggaaacagagacatggaaataaatattccatcttctgggaaaacatgcaccattatcaattatatggagctaatcttcattttaaaaattggttcatctttccattgtcagagagagattacaaagattggtaatattcctgccctgttccttagaacttttagagaatttccattttctagtttgctttctccaaagacttggaggtcagctgaactattcatattaccaaactcacggggatatgtgtcccaccaactgacccatatttgagcaaattgatctagattcttgataaatattattgcccaataaacatcacatacttttaagatctgggtttaacatattatcagaccttggagacatggctccttagatccccagaagcagagttaatttagctaaccagtggtgagctgcattctgctgtacgagtttgctctacctcctaatgtagctataatatttgtaggagattccagcattggccaaaagagtggactaccctccctttatgatttcttggaaccctaaaactttatgagactatgaatatgactaggaacaaggagatgattttcttctcagtagtgaaaatcattatatatacatatatgtctttataatcctaatagcacaacttatattgttactatgttatatgggccaagcattgttccatgctcaaattaactcatttaattctcataagaacttatgtggtaaatactattattatcccatttttagaggaggagattgaggtagagaaagttgaaatgattacctcaaagtcagaggatccaaagtacctgcccatcttaagataatttgaaagtataaacttgttttctgccatgaaggacacacagccaaaattccatacaaaattcctaacagccctgtcacttttttaaatgtgcaagaatccaatcaagaagtgtgaatactgatactgttcagcacttggtgaccttgaacttgatcgtcagagtatgatcctctaaaaggcaatctgttttaacatggtctttgctcacagcacaggaggatagcaatttcaggagcaggatgagcactgcaattgaaggctaagaggacatggctctcggccaatttaacagatcagtctgtaagaaattaaaatgaacataaccagagagagatagggtatctcttacgagaacatcagaggagtgtctacagccatgtaatgttgacattcacttccaaaaactggcatattctctaaaaggacagcaaactggattgacatgccaaaaccactagttgaaaaataaaaataatccgttattaagtcagttgttttgtcattgctattttcaccaatctaattgaacaggccaatgcttttacaagaagcagacaagtcactcatcttgaagtttaggactaatagctgagtaaatgcttctgaaatacacagagagtagactaaccaacagtactcacaacacagtgaataaatacactaatatatgtagaaacccaggcatatattaggttaaattaagaaaagagaaacacatgaatatcctatagaatgagatttgaggagaaaaatcttctaaatatgaaattaggttccctcatcatatttaatttttagctgtaagtaatctattctaagaccacagtgtagaacatcccagtacagacacacagtttaataatttaataacttcagaaataaccatagatgtcaactaggccaaacccatttcacagagtagaaaacaaagtctcagctgggagcggtgactcatacctgtaatcccaacactctgggaggccaaggcaggcagatcgcttgaggccaggagttcgagaacagcctggccaacatggtgaagctccatctctactaaaaaaatataaaaactagctggatgtggtgatacacacctgtaatcccagctactcaggaggctgaggcaggagaatcacttgaacccaggaggtagaggttgcagtgagcagagatcgcaccgttgcactccctcctgggtgacagagcaaggctccatctcaaaaaaaaaaaaaaaaaaaaggcaaacaaagtctcagagaagttaagcaatattcccaggctcatgcagttcattagtgacacagccaactctacaacctggttcagtctttcacaaaaatgaaagaaagaattgttggcaacagaaatgcagttgggcctaaaatgttgtgatacagaacctttcagccatctcttctccactcgccatgtttagaaacttcagagagcattaagatacattagttcggccaggtgcggtggctcacgcctgtaatctcagcactttgggaggccgaggcgggcggatcacaaggtccaggaaatcaagaccatcctggctaacaaggtgaaaccccgtctctatgaaaaatacaaaaaattagccgggcgtggtggcgagcacctgtagtcccagctactcgggaggctgaggcaggagaatggtgtgaacccgggaggcggagcttgcagtgagccgagatcacgccactgcactccagcctgggtgacagagcaacactctgtctcaatgaaaaaaaaaaaaaaaagatacattagttcactttcatgacacagagagatcctaagttactcactacctaatacttctaaggggtgtgggtttcttatcaactgcatgaattcttcctaaatgatcttgaaaagaacccactatcattctgaatgttgcttggaaacatatctactgttcaaagtaactttgttgagcttagaatttaaacagaggaagattaatgtcagagcatgtaccatgtgcagattaaaaactccactgtgggttattccagaagtagaccagaatttttttcattttctttttgaaatcgtgtgtctaaaaccagcagttagttaagggcagaagagatgttgcaaatgaagatttagacagaaaaatttcaaagccaatttttaacatctacgttttgttcagaaccaccataagcaaaagttttttgtttgtttgtttgtttttgagacagagttttgctcttgttgtccaagctggagtgcaatggcatgatctcggctcaccgcaacctctgcctcctgggttcaaacgattctcctgcctcagcctcttgagtagctgggattacaggcatatgccattacgtccagctaattttgtatttttagtagagatggggtttctccatattggtcacaggctggtcacccgcctcagcctcccaaagtgctaggattacaggcatgagccaccatgcctggccaagatttatttttaagaaaagaaaaaaaaaatgtttgttttatagacaagaaattgggaaagaataaattgaacagaacataaaaccctttcactgtctaaaaacaattggattagtctctggttcccacttaagttttaaaatctctaaaattaaagtatcatgtgaaagtcatgaaaccagtttttaatgtacattttctcaattcctgtttgccagtgaatagactaattgtccccaaaccaaacaaagtccaatcttacagagctaaacaaacagaaaatcaaaataactggaaggagcatcatcatctggttatctggtcatcataataaccagagagtgaatcaactgatcccaggatagtccaaaggaccaaacaaacagctgtcattccagttagtagtacctcacttgacggagcacatcataaagtccttctaagacgtttctaatcaaggtatgtgagcctggcttccaacatacctcagagacatagaaatgccctatgataatcttgatgcttcttccatagtcatgtcttgaatactattattcttgcaatatagtatatgttttcttccactgtcataaaaaaatggaaatgcttcaatctcacctaaagacagacccttccagctgtggatactgagtgtccacacacagcgaacagagccctgggttagccatcaggagaacagggaccactctcaactcagtcttttcccagccttgtgtccttagcaagtctctgcaccacgtcctcatcggatgggggcagaaatgagagagaaagggataaagccagctctacatgcctcttgaaaagcagaagcactacaaaatgtaagatattattgttgttacaatgcaaagggtgaagccaggagcaccccactgtcatgacacagagggccacggcagaggcccatggggatgtggggcaggtatcaacggatggcctgtgtgcacagtgagcccatccttctccattcgtgcttggcatcatgaaccacgaatggttcttcttacccctgaagaaccattattgttaagttctgcagtccctgctatggaaatgaggctgtggtgatgccttggtgcgatggctcttaagcaagaatggttctccagggttaagaagtagaaggtacactttggaaggccaagatgggtgaagcacttaaggtcaggagttggagaccagcgtggccaatatggtgaaaccccatctccactaaaaataacaaaattagccaggcatggtggcacgtacctgtaatcccagctacttgggaggcggaggcaggagaatcgctcaaacccaggaggcagaagtcgcagtgaactgagattgcaccactgcactccagcctgggcaacacagtgagactctgtctcaaaaaaaaaaaaaaaaaagtagaaggtaacgcacatgtttacatttttccagaatccttagtgcctgcaatactagagcatgtgctttcttgcatatggccagaatagatcatctggcacctcccagagttcacccctaactcccagggtcattatgggagcagaaggattgacattctcaatcatcattgaagaaaggatgcccctaaagagaaaataatgcccagtacatcataaatcctacctcagcttttaaggcaggtgatttgaatcctcagcagtaacttcatctctaagggtagccatttacaaatctgagagttagccatatacagtaatgtgaaaagaaacacctttcacaaaacagcactatttcggaaaaagaatttattctgcttagttttatgaaattcttttctataacctacctatctactatttttgtctagatagagatttggtcctttcaaacacacgtgcacacgcaatgccctcctgtctccttttttgggatgctcctccatctaaaaaggcagtggaattccaaaggttactaaatatactctggctttttcatggcgtgcaataataaaataatgctctcttttcatctgtttttgtctttttaggtaaaagtattttttcaggaaggaactttctaagatcattcagtacgtgtttggagtgaagccctgttcattttcatttctacaaatctcataccagaaagatctaatgcagccccactcctatgtgtagcttccatcagtgtcaatgccagagaggcccaagggccccctcgcacagttgagtatataacctcatgagtccacaacttcacttccccgagtgaagagaagaatggaagtgaagaaaagaatggaaattcaatcggtaccagcagactgtcagttcctccagtagcaaacaataaatgcatctgagaaagttctggtgaaccaatcaacaggggggctttgttctgaacttggcggagcctacctcgtgccttgtaaatgtcagtgtgtgtacgtgtgagggtctgacattactcagcagcacataccaaaggccaggaatttggcagagtgaggctgattacaatgcctaaaaatattctgttttatcaaaatctattctgatgccttttagcatgtgggcaaaatgctagagcagcaggctctttaggaagcggaaattctgagaggcgttccaaatatccaaaacgacacaacctcattgtgtaagaagtaacccttcagcttaaattcttgttgtttgtctatttttatctcaacagaatttttttttgtaaaccatgtaaggcaatgatctctcctttgtaaacatttataaaatgtaatataatttatttaacaaataattattgagagcctattatacacaaggcactttgttgggcttaacagggactataaggtcaaataaaaaactgttcttatttttaatgtgcctgcaataagaaaagcgttaagacctttcctgagaatgagctgctctgggcaaggcaaactgtgatccaggctttagaagaggcaagaagcaagagctagggagaaacggacaagggaggaattaattttctgctaagaactggcaaaggcttcttgagggttgtggcattttgatgtgggcctttcagagtagatagagttggccaggcagagctgaggagtgctctaggcaaaggcagcagcatgggtgtgtgcagagatgggaagtccagggcagtagaagaattcgtgtgaggtcttcagaggtcttcatcatcaccagggataggatttttccaaaatgagaaggctaatggcacctagaaaatgtactacagtgcggtagactctaaacaaaaggaagggtatcatttctgtgaaactgccaaagccacaagagtgataaattaggccggagggaggcaaggcttaatcctcatttgttgaacatgttaaaaacatgtgtgtccaccacgtacatgtacacacaaacacactctaggcacgccaccttatagcaattcttcctttttcagcaactgatgtactctttgtcctgggttttagtttaggtagctccctctcattacagattgaccaagaagctgcaacttatgtttctaccatagagtttgtgggagtaaatacaagaggtgtgatgtctatcttctgtgggaagagctctggaaggcttgctcaggaatcacctttatgtttacctgtaaactgatacttaaagaataattgtctagcaattgtgaggaagactgattgccaagttatgacactaccagatagagccagccaggtgctactgcatagccattcaacaaacagttactcagtgctcactgtctacacaggtatgaggcgatgaaaattgtgcctgagaaatgcctaataagacagaaataagagcaacgccatttctgtgtgtgagagaacaggactggtcaatctactgatggattgcagtctctctcttatacccagatgcctatatgcatatacccttatacctatatgcacgaagaagagctagaaataaaggatatattctagcacaaaaggtatattgaaccaaacattaaaatatatgtgtgagcccaattttcacatttctaaggccagaattgtagcagctgaagtcaagtaacttctgatcatcggcacagttttcatgagtgttctccataactccctaactcaagaagacagacacaaggccagttctggcatttggttcattaccagtggccacagatatactttgtttttccgagcaacaggtgagttgttcaaccatgcattccctatgaactgtgcatctgtctaccctggggccacctaatgtcacaaccaaccaaccttagccaacagcaccactgatggctaaaccacttagtggtttaacttccaatctcttcctcactgcaccttcctacagaggcagatcatgcatataccatgtgcccagtttttctgtctttccccaccctctagccatttactgtcacttcaggcggccttttttcacacttcactctctacttcattccatgtagaaaatgatctcaggaaaatctccatccattccaaccataaaccaaaaatttattttattctttagctcctatttgagtctcaccttgtattataaaacacattaaatatgtatcatttcacttgattctccaaacaaccttgtgagatagatatcacttatcacaatttacagagaagacaagtgccttttgccagagagtttagctagtaagtgaaagaacaggtctacaaaccaaggcctcttgattcccaaacactttgtccttctagggtaaaacaatagtactaatggttcacctgctataaataagaaaggagaatttttacattttgacatgaaattaacataagaaaccaaaacttccaacagcaatatcatgtaaaactattcagaagtctccttcagcatctagacaatgttctgacttagatagctttttctcaagaagggtgtctaagattgatgtaatcaatgctattttctacttatggtaaataattcacttaataacttttgttctatcattcattgcaaatacaatattttagtttcatcatgttgtacatggaatagcctggatagttagtattgctttgaactctactacacatactgctattcttgcattaatttattcagcaaatgtctattaaatattttctatagtaaagatgctacaccgtacagtattaggaatatcaaattatgccagcacactctaagtcgatctatttataaggtgtcatccatgcttaattcaggtatcatgtaagtgattcaaactaaatgacaggaatgaagagaacccaattatggttaaattttttaaataataaaaccaattggcacatttttatgtatttataagaatatttcataccatgggagcagaatggaggaaaagatgaaagggaaacaaattttagtttgtttccttaaagaaatatatgttagattttctcattcctgcctgccccattcctctgtctgctgaacagaatcaatgatagcagcagccgagatcccagtggaccctctggccaaatgcagctgcatgagtaagcccaggtaaagacaacaaaggaactcccctgcccaaatacagatgtgttagttttaaattgtttaatttaactttgttgtttaaatttgttgttgttaaatcactgttgtctgcagatgagaagttgcagggtagtttgctacacaacaatcgacagcagatagaacaaaacagaattccctaaagactgcagggccagaagaaagaattgagttggtcaggacaaaagagtggataacagtactgactaggataagcgtagacgtaaggccaagagggggtttccatgaaggagtgtgaggagggcattctgggacagcagaaacagagtttgttcaggagcttttcctgggtataagagacagactgcaaccagaggaaatacagcagataaggctatgcattaggaatgaatttctccattccatcattttctcagtaaactgagtaaagatctcaattgctttcaattgtttattataaatgaaaatttgctttgagattcattttaaatatgcattctcagtaattctttttactttaggggcagaggatgtataacggatgattttcctcttagccatatggaagagttggacaaataaactaagtaagattctaagaagaaggaagattaaatacagctagattgtgatcctaagacaaaaatgaaggagctaaggcatgcagactagctggtcagttatttgctgacaccttagtattctagtgtagatggaagactgaataggaggccaagaaaacaacagaacaagaaaggcaggagccatgattaagaatgagttgctctgtgcaatcatgttgggcgggacaaaaagagaaagtcaatttttggacttaagaactagaaattaagaggcaaatatgatcatagcaaaggagtaaaagtagaaaggaatctggaaaagacaaaaaggaagttggtcacaacactaactcatccatcgcagagaaccagaggagttggcagcagatgagggaaaggaaatccgtgtggcagtgaggagctcagcaactggcacaagagagaactatgaagttggagaaaactaagttaggaagggcaacgagcagaagagaagatgactaagaagagaaattcttaatagtaaggcaacaagaataaaaccaacgtgctcttaataatatgtgtgttgcattgtattaaattctttggaacacttcccatgaaacccgatcctcaggcatgaaaataacatgtcaaacctccccatgacaggttacctaaaaataacttccaggtaccaggggaagctggtgaataggctggagctcagtgatttgtggatctagataggctttttagatccagaaagtacacaatccagcaattcattccaagttagagaagtatgtatgcctgctgcggcccctctccagggctaccaatgtctgctgcactctcactcctggtagtcagctgagtagtctggcatagctggttttcaaaatgcaattgtcacaataaatggataggtgccctctgatgtccctttgagatccaaagtcctaggatcagggccagctttctgggcatgcaatctgtgcatttgcacaaggctctgtgctccagtgggtcctgcacttggtttaatgctcagctgctaccatcttaaaattcttgacagtttattagcaagatcccagcattttcatcttgcactgtgcccaagggcatgggaacccacctcttgcatcagtgtgacctggatgtgagacatggagtcaaaggagctcattttggagctttacgatttgactgccccactggatttcagacttgcatggggcctgtagtccctttgttttggccaatttctcccatttggaacagctgtatttcccaatgcctgtacccccactgtctctaaaatgtaactaacttgcttttgattttacaggctcatcggcagaagggacttgccttgtctttggtatgactttggactgtggacttttgagttaatgctaaaattagttaagacttggtgggactgttgagaaggcatgattgattctgaaatgtgaggacatgagatttgggaggggccgggggtggaatctcatcttgaattgtagctcccataattctcacatgttgtgggaaggacccaatgggagataactgaatcatggggcagtttcccccacactgttctaatgatagtgaataagtctcatgagatctgatggttttgtaagggatttcctcttttacttggctttcattctctcttgtctgccaccatgtaggacatgcctttcgccttccaccatgattgtgaggcctccccagccacgtggaactgtgagtcccttaaacctctttttctttataaattacccagtctcggatatgtctttatcagcagtgtcaaaacagtttactacacactgaacatgacaaattatgtaactggtcctgcctgggatctgtgtcctgcactaaaactgaacaaggactgaattgccatcacttgtgggatattttctggacttctttccttacagtacaaagtaccacaccaaatgtataaaatctcacaatgcagcaattgtccaaggcatcttactgcttctatcttgactgtgaagaagagggtacaataacaactcccaactctcagggtgagaaggatgattgaaaaggaaatccctgtagatggatgagatttttggtgatctctgaaagtttcaattaggctttgcagcatatttctagagtcaattatcaggaatatcaagcccatgctatatcaaggccttcatcactttctagattcaacaaactttttccataaatggctatagagtaaaattttaggctttgtggcacatgtgatctttgctgcagtgacaatgtgaaagcagacatagacaatacctaaacagttatgtctgtattctgttaaaaatttaattgcacaacccaggtaccaaggacattaacactggaaaagaaacttttatacagattacagacttcctataaattttgtaaattgttttgactgtatccattagttacaaaataatatccaatatcacatatagcattaactcaacataactctttggttccctttaatcttgaacactttccgtatcattctttatatttatgacattgatatttttagaggatagtcatttattttgtacactgtcccatcttatgatggccccttcatttttgacatgggtaatttgtgtttttgatcaaagtccaatcctgccagatatacactgaattaacagtgttttgacaaagccaacatttggtcttcattctgtttcacatttgttttctatttcaataatttctactgtgtgtttattgtttctttctactttattcggggataatccagtctttccctttcaaacatatacagatttaccttttgtcatagatctattcatttattattgagtttatgttattatttattttcaccttaaattatacataatcagaaaaaaataattccagtgattttattactgttttgctttgttctgaggggacttcttttatggcccagtatatgattatttttgaaaaatgtgatgttcaacaaatataagttagctgaaacttattgactgaggttttttgaatcatctatgtccttcaagaatcagttcataagaaatggaccctgaagaatttaggtataaatgggcaccatatttgcaacttactttttaacaattcagcgaaaaaaatatatatatgcatgtgtttatttcattattttacactattttaaaaacttttctgtgagtaagaaattatccaaaatgtttaaaagtaaagccaaaaaattaatattaaaaatatttttaattgcaaggacctgtgttgagcaggatttggcccatgagtcaaaatttgccaaccctgctgtagagaaaggaggcatctcattgtatcatagattacagtaaaaatcggatgacctgaagtttattcccttggttacctgtgtcacataactcagactgagtcctttcttcactcggtgtctcagtttctctatctgctctacaaagctttttttttttttcaatttagtattaaatatatgggaagccttaggaaaactgtataaactggcctgggaagggttactggtctctcttcattctgtctcctcccccatttgccacatacaatgcactaaaatgccttataaaatgaaatggagggaagacacagagaaggcacgcaacaggttgaataaatgatgaggcatcaagaagatgaaaagcagcaggatctttgaaggaaagatgtagaccataaaatggggcagcaaattgaaaagacgaagattggaatgaaaagagtttgaagccaaaccacagagaattcaacccaatgagatcactagactgaggtaggaaaagaaacatcatgatatacttccaaatgtgtttccagtctctgctcattaggaataaaatctctaccattgtgtattccttacacccacagataatttgatacccactctggggtaaatctgaatatcttagctttccctaagaaaagacgttgccctcagattgctgacaacctgcagaaattcacacaagaagagaggaatgctgcctgggtgttgactcctggagatgctgtctctagcacattatgtttcacagcatttattaataccattattggcccaagttacccacatcacttgctattcctgtaatcctttaaaggcttgcacaaggaaacaaagaacatacccatggatattttttaaatgcctacaatattttctgcttgacatatgaaggttatccaaaccatggtctacattaaaaacaaataaagctgagtctcaccttatttatttatatccagcccactataaaaacaaggcctctctcacctgtctcacattgttggggttgaaagggtcaccaaaaatcactgaatgtgaaaaattaactccagagagagtatgtactttgactaatgttccagaactaaatggaattggtagcaagctgcaatggttttaatgtgccccacaaaagtttatgtgttggaaacctaatctctttgccctcatgaaaggagtagtggaataatgttgctatcactgcagcgggtttattattgcaggagtggctttgttttaaaagcaaattcccttggctctgtttttcttcatctttccccttctaccatgttatgatgcagcatgaaggccttcaccaagtgcaggtgccatgctcttcccagcctttagaactgtgagctgaataaacttcttttctttataaattactccatccgtcatatggtgttatagcaaaagagaatggactaagacatgggacaaagattcagtaggcttattaaattatctatgtaactacagagagctagcgaaccaatttcagcttaggggaaacaggaaattcggaaacaggaagcccagagaaaaatggcactggactgtgactcctattgcctcaggttagatcatctgacttcacaaggtaaaagcttctgcacacaaacctgcttcagcccttttccaccaatgggacacccttgctatgtagagtagtgcaaaactctgtcatttacttgtcatgggacattgggtaagtcactctgtattagtccatcgttttgctataaagaaatacctgaggctgggtaatttataaagaaaagaggtttaattggcttatggttctgcatgctgtacaagcatggcactggcatcttctcacttctggtgaggcctcagagagcttttacttatgatggaagctgaagcaggaacaagcatgtcatatggtgagagaggaagcaagagagagagcaagaggaggaggtcaggctcttttaaacaatcagctcttgcgtgaactcactcatcaccaaggggatggtgctaagctcttcatgagatcagaccccacgatccagcgacttcccaccaggccccacctccaacagtgtgaatcacatttcaacatgagatttggaggggacggacatcccaactatatcacacgtgaacattctcagcctcagcagtcttatcagaagaatgaggataacccagtaaactcaagcctaagtgatggaggtgtggaaatgcttgacagacagagttgttaaaggggaagctatgtcatcataaaagggaatgagctgatgactatgaccatgttcttttcaggagacacagtgaggtgcacttaagcagatgtgattggtgcttccaaaccaactcgtttgactgccaacaccaactactctcttcctgaggtgatctctggccattgtagcccacatggaccacatggagcagactagggagttaatgtatccctagaagcagtcctcaaccgtgactgaaaactccagcttcctcatcctgggataggagcaggcacaacaactctgaagcatgttgcatagtgtccccctggcagaaccaaacctcagctgtacacagcagtgacctacttagcatcacactctttaatagttttctctttttttcctaactcacctccctactccctgctgctgtttcctggaagcacttcccacataaactatttacactcaaatccttatcttagagtctgttactgggtacttagccaacctaagatagccaagtagaaatacccagcaggtagtctaatatccaagtctgggagttgtgtcagcaggacaaactgtatctgcaagttgttgtgcattcatatttgctatgtggaaaagagtggttagagtgagtttaaataaaaattttaaagtgaggcagaagctgctaagacaagagagaatttgaggaagaaatatttccacagaggcccaaaaaatcagcaaaagaagatgataacaagaacgccccttataataaacaaggaatataggagacagaaaaaaaagctacaatgaaacctgttttacttctagcacacttatgtcttatcaggatatacacagagagcacaaacgtcctataaaagataaagaagcatgtccctttggcagtctatcagttgcactcagcatcttcaggagagaatagcgagggcatctgatttcctatccagtattgccccctcctagaactcacagatgcaagttgataactccttttttataacttaaggctgcagctgtcaggaaagagagggagacaggctcaaccactctcagtggccagaaatcaggtaatgtgattatttcacctccttccactaggtatttcagcaaatcataaatgtataatgacagctacatttacttctaattctggacatgagtattactagtttttcagtattgctaactgtcaagacatactataaattgtccccttgacccacctgatattcaaaatatcctactggcatttaatctcttgtgtgatgctctccccttgagtgtaggcaggacctgtgacttgcttctaaccaactgagtatgatgaagttgatagaatatatgtaattacattacataagattctaatgtctttcttgcaagcaaagtttcacccttatggcctctgagggagcaagtgggtatgttgagaagaaagagtgacctccagctaacaaccagcaagaaatggaggccctcaacctaacgtgccacaaggaactgaattctaccaacgaccacatgagcttggaagcagatccttccccaattgagtttcaggtgagactgcagctccatttaacattatggtttcagcctcatgaagccaaggactagaagagccagctatggtacactcaaactccggatgtacagaaactaataagtgtgtgttggtttaaactgctaaaggtgagatgataaatgtgtgttgttttaagctactaagtgtgtgctaatattgttacacagcaatagctaaataatacgctaactataatcttgtattgacttactggcttttagtcctaagaattttgctatttatattgaatacttttaaaccaataaaccatgtggtttgcaaattattggatttgtcattgcctttttgaaatacaggctaccaaatcagccaaaaagtttccaccgacacacaattccttgggtgagtgataagagagaccctggtaatagccagatatgaggaataacttgacaagtcttactgtgcccctgtaggtcagaatcaacctccaaacagaaggaaatatttggtgctgtgagctccatttccctcacacttgagcttcaggagaaatttgagaaagccaagtgtgagtaatgactagctaaagagccatgatttgcaaatgttcaacattattaatcaacagggaaatgcaaattaaaaccacaatgagataccaccatactcctgcaagaatggccataattcacatatacaccatggaatactatgcagccataaaaaagaatgagttcatgtcctttgcagggacatggatgaagctggaaaccatcattctcagcaaagtatcacaaggacagaaaaacaaacaccacatgttctcactcataagcaggaattgaacaatgagaacacatggacacagggaggtgaacatcacacaccagggcctgttgggggttggaggactgggggagggatagtgttaggagaaatacctaatgtaaatgatgagttgatgggtgcagcaaaccaacatggcacatgtatacccatgtaacaaacctgcacattgtggacatgtaccctagaacttaaagtataatgattttttttttttaaaaaagaatggccataattaaaaagtcaaaaaacaatagatattggcatggatacggtgaaaagggaacacttttatactgctggtgggagtgtaaattagttcaaccactatggaaaacagtatgagatgccttaaagaactaaaagtagaactatcatttaatccagcaatcacactactggctatctacccaaaggaaaagaagacattatatgaaaaagacacatgcacactcatgtttaaggcagcacagttcatagctgcaaagatatggaaccgacctaaatgcccatcaaccaacgaatagataaagaaaatacggtatatatacaccatggaatactactcagccataaaaaggaaggaaataatgtcttttgcaacaacttgaagagagctggaggccactatcttaagtaactcagaaatagaaaacaaaatattgtatgttctcacttataagtgggagctaagttatgaggacacaaaggcataagaacaatataacggactttagggactcagggatgagaaggttgggagggggtgagggataaaagactatgtattggttatactgtacactgcttgggcaatgggtggactaaaatctcagaagtaactgctaaagaacatatccaagtgatacggtttggctgtgaccccacccaaatctcatcttgaatttcaatgtgttgtgggagggacctgatgggaggtaattgagtcatggggccaggtctttcccgtgctgttcttgtgatagtaaataagtttcatgagatctgatggttataaaaaggggagttcccctgcacaagtgctcctctctttgcctgccaccatccatgtaagatgtgacttgctcctccttgctttccaccatgattgtgaggcttccccagccacatggaactgtacgtaagtccaattaaacctctttcttttgtatattgccagtctcgggtatgtctttttcagcagcatgaaaacagactaatacaccatgtaaccaaaaaccacctgcaccgcaccccaaaaactactgaaatttaaaaaaaaaatttaagagctatgatttgaaacaaaaagggcatgagatttaaaaaaaaaaagaattatgttcttgaaaaattattgagactacagagcactgaccaagacccaggagaattcaggactccagtctgcatataaacctatctgataaagggtagtcgttaaacaattggcaagagcaacaacattatgctaactggcataatacccttgataatgaaagaagggagttatacaatttattatgaaatgactttactggaatccgttgtaaccacacacagagccgagaggagcatatgaaacaggtcttactctatagtcaagtcatatcatctaacacataacagttgatgtgccttggggtaggcggtagttggtgtctcaggagtgacttctttccttccataaagtcattctgcccaactcctttacaatcgtgggttctttaacattggctcatgaaacatcctctcacagtcacctgtctcatggctggcaagtcctgtgagaactctcctctcacaggaccccacagtccctttagcttttctatgtgcccctccagcgacccccctttttttgtttcagcctccaacgtgattgttagttattcgggtccatatgcgtcctctatggatgaggagcaaggaatcagggtgtcgggaaagtgtgagaaagagttagaagagggtctctctttcattatatctctgagaggctgagatctctcacagctagaggtagtctccttgcagagatgttactcctctgcccaaacaggatgcacttctcttaccctgggcttcccctctgtgagccacgcatcatgccatggagaccactggaggttggtggaagcaaaaggccatcctctacctaacctaactcttgaagcttgtccaaaggatacattctacttcttccccaccacagacacagaatactggggattcttactgtgtagcatgcagcatccagccacttgcagagtgtccactcagtttgtgctcaccttatttcatggattggccaaagagataaaggatttcctgtgagtgttcccgtatggaaatacccattctttttcatttcagatctccatcatcccacactcaattcagaggaaatcagaccttattctccctttcctcaactttcatccaagaagtacccttctcctcatgttcagcctaccacccactcctggatagggaacaagaaggaagaggcagatcctcgtcggtctcctctagagtacaaccaatggagcatctcatggtcagtgagatgagttcctttccctccagtttcttgatggattgaaggtcattgctctaaggtcctgttatggactaaattttgaccccctaaaagtcatatgttgaagccctaacctctgatgtgactatatttggacacaggatctttaaaaaggtaataaattaaatgaggtcataagggtgggccccaaacctaataggactgctgtccttacacaaagaagaaacaccaggggtgagcatgcacagagaaaaggctatgtgaggacacagcaagaatatggccatctgcaagccaagcagagagacctcaggagagagctaaccagccaacatcttaatcttggacttctagcctccagaatggtgaaaaaataaatttgtgttgtttaagccatttagactgttggtattttgttatagcagccctggcaaacaaacagaggtccagttgaattttacaaactggcaaggatcctgactggtctactagctgacaggagatctctccagatgtcagggatcttaggcccacctgggacccccaggtttcaaaacaagacccaatctctacccagaagcttctggcattacccctagatgatgtgtaagtattttttctattgcaaaatttgtgcgctgggctgtcagatagctaacttatacggtttggaatttacctctcagctcagtagcataagggaggtctttgttttctcccccaaaatgaacgtcaaagatcctaccagaaccttcagcaaagcataatgaatccagatacttggttcctaatagcagcagatatatgccctgggagacccatatttggacttcactgtcttttctactccagatgtaaattttctaggttattattaaagtaaggttgtggattctcttgagggtgatataaaataatcatagatattttaatccctctgaatttaagtatttcccattgaaacagagcccctttttctctctcacttgcttataatgactcaaaagggaaccagtgaactgaaatttttcttaaccaaatctacaaagtgtaagctttcttgtcctacagggaaaagcctgcacatactaaagttatctaggttatcttggaaagttttagctgtccagttcccaggacaagaattcaaagctttctaactctaaagctttcttattctgaataatttctaaatgggcttcctttgtaagcaatagtttgtactgactcaattgcttacaagggtcacattttgactagacatttcctgcctttgggctaatgaattacatcataattcaatttgaatgcctcaaagtcatcagccagcaccctcagcattgtggggcagtacttctaaggcaatagtagttactgtctgagagctgaattttttctgcagaatgcaccatcaataaatgatttttatttgccttccctaaagcaaggcttttgtgacgttgaatttgtaagttgtattttccatctcacaaaagatttcacaaggaagtagagtttggggattgcttctctgctcttgtgcatcccacaaatcctcacccacatcctgactcctcaacaggtcaccgtgttaagagttggtaggaagaaaccctttcctttaggatttttcctcttctctataccccatggccacctagtgtaatcaagcccctttactttcttccctctgggctcttcttaggttttccttaccattcaattcaacttgtttccaagtgaagggaagaggatggggaatgaggcttcccaaggatatgtccagtatctttatgatactgagacctttccaagtgctgtcatttgaatgtgtcccccaaagtttgtgtgttagaaacttaatctccaatgcaacagtgttgggaggtggggcctaatgagaggtgattaagtcacgagggctctgtcatcatgtatggattaatgtcattattgtgggagtgaattaattatctcaagagtgggcttgttataaaagcaagttcagctctctctctctctctctcactcgctctcaccttccaccatgagatcacacagcaagaaggctcttgccagatgctgacaccttgactttctagcctccagaaccatgagccaaacacatttatctttgttataaattgcttggtctgtggtattctctcatagcagcatcaaactgacctacacactgagcacctagatcagactcctcttagaatatctcctgagtagcatcatgctacaattctctacctctttctccactgtgagtcagtaccaaatgctgtctctcttccttattctagccatgactctggatggagaaataagattaaaacacacacacacacgcgcaacttactggaatttatagagcagttacttcatgccagacactgtgataagtacttcagaaacattacatcaattaatcctcacaaacaactgttactcccattttataggcaaggatattgagacacagtgaccacacaaatagcaagtggcaagccaaggtttgaatcccagtttgaggtcaccactgtgctctgtgaacaggacttatgatggccaagtactaatattacaatattggaatttatactctctggagttacgattcagggagagatgatttggaagtataaagtcagatattttcatattaaatctaggtcaaatgttctcaaccagaggttatttgcatcactctcccaccaccctgaccaggagacatttggtaatgcccagagacatgtttggttgtcacaactggggactgctactggcacctagtgggtacaggctaggggtgccgtgaaaaattccataatgcacaagatgcaccacccccccccgccaaagaattgcctactccaaaatgtccacagtgctgtgatccaaacaccacctctaggggtttggtttagttgccatattttcctctcccctacccattcttctctttggattttaattctctgtgtccattttaacagtcttgttttaggttaatcttttactatgactttccaaggtccttttaggaagcaaggggagtgtgactgaaggaaaaactgacattcaaaaaatctcctgagaaatagcaccctgcttggaacaaaatcctctgtgaacactattttgggaacagtgaccaaacaagccagtcgtctgccacttacacatccaatcctgcttactaccactgcttcctggaatcctgtcccaagaaaggggctaggggtgaggagagtggttaccctggaacataccatttctatgagaaatcttaaaagaaaaaaaaaaatgaagacaacaaacctgtaacttgatgccagcctgaaatcctcttcactaatcataagtcagagaaagtgaaattatttccatcacactcatacagcatgttctctggggtttgcaggaacagaagagacaatgtggagaaaatgcatcgtctgtggttctgaaatcaaagcctaattagtcagaagacaaatcccatgggcttcagtactaaaacctatgtttcaaccatgcctatgttgggaaagtcctaaaagtcaaagaatgataaggcaactttagtggagaacatctttgtttacattacaggactcacatgtaaactttgaaagcatgcaatcaagtgaacaaaatattttaattggcctttaaaatattattataagagcaagaccaacttgtttaaagtattgcctggctggtctctggttttggcagctcattatactgtcttaatgccgtaagatttattaatggtcacatgcatttctctgaaaagcattccacattttatccaattctgggtaaaggttatttataccttagaatgctcttaattgcttcacattaaagaaaaatatggaataagttataagtattgcctcatttaatgtattttcaaattatagcgttttggcaagttttgctcattgacttctttaagcttgggatatcttttatcccttttacattctctcaaaattttccttatcactcaaaagctaattcagataccaattcctccattaatctgttcctgactcccacatcagcattaaccaaatgtgcttctctgctcccaaccatattgcttctgtattcactaggcatatgtaacaatcattttgctctacattatatttgtctctgtctttcttctttaattaaagtaattaaagtaccttcagtgggaaagacagcatgttattcattttgcatctgaggaaactgatagggtgtctggaattagcatccaataacgattgattaaattacatgtaatcatatgagttttatcaaataaaaattgcttcaagtttgttcttttggtttgtttgaagcggtttgctcattttaataattacatgagacccaagcctcaatctcttagaacaggtagctctagtgcctctcctgctctagacttaattttgtttccattggtgccaggatatgaacaaaacattttctgatgcaaatatagtctcagattgggaccacaccaaataccacagtccaagtaggtgaataatgcactgaatatttggcctggtttggctgattgcaggcaagctagctaataattaattaaagtaggatcttctgtatttacttcatttcaaaactccttgacactctctcactcggcaactctcattatcaactaatgacatttaaacacctaatacatactaggcatctttaacaactagaaatacagagctcagtaaagacacagaactgacttcatatgaacaaatgtagaaacatattaatagaagattctctcttttaatatctaaaagattgaaaagattgtttaacagaaaatattgacctagaatgtgacttgagcaggcaagtagtttgtttccaagagaaacaggtactctcctagtaattgcattttaaatatacacgatgtgccactgagatcccataaataatgcagaccaaggtctctaggccatgcatgggaagagacttgcaaagattaattcaaagacaaggatcatctctgggaaaatcccagctgcaatgctctactggtattctgcatcagattctccatggtttctacctgaaagccagaacctcaccaatctagtttgattttgttttcttatggcctgatacttgatgtcctgtagcaggaaaactgctcccaagctgcaatctgtggcttgaattctgcttgcaaatatcaagaatggtacaagtctttctgaagctgtgagtttattttcacaaaggaggaaataagccacaatgtaagaatagatcccaagttttccttatcatttgcaattcttacacctgcaacactggctggaaacccagagacatgggttttggttctgtttaggcttttcacaagttgtatgagcttgggcaaactacttaacttctcaaacccagttatcttatcttcaaaataaaagagattgacaaggttatctctaagatacactccaaatctggaggcctatgactatttggtttttaagttcagctgtctcacgtttctcctggaacatattgtcaggatatctggagaatcaagcatacctactaaaaactgttaccaatattaagacatgcccataaaagcccggtgtggtggcttccacctgtaatcccagcattctgggggctaaggtgggaggatcactgaggccaggagttcaagaccaggctgggcaacatggtgagacactgtctccacaaaaagtttaaaaattagccaggtgtggtggcacatgcctacagtcccagttactcaagaggctaaggcaggtggatcacttgagcccaggagttcgaggttacaatgtgctatgatcatgccactgtactccagcctgggtgacaaagcaaaaccctgcttctaaaaaaaaagaaaaaagaaatgcccatatacagaactattcagacttcccttgaaatattgtaaattaaattagcaaattaaatttcttattccttctctctagtgatatgatgatctcataaaaaccctaccaaggtcactaagagtagaaatattttcctatttcaaatctatttttgaatacgtaagtattatttcttttgaatctacattatgtattcctgagtagtatgtagcaattaaaagatgagcatctttgtaatatttatttaattttgaaaagattatctcttcaacttatcttcaagatgcatctaaatttagatccatcttgtttttaataatttcatgaggaaaacctggcagaaaagaaccctataagtggaaactaatacattccagaaagaaaggactttccttcaaaatggaaaaatttacagtataaggaaggaggcccttcaggcaaaacacatctcaaattccttttattcggttttcatttaatattttgcatacttgaagaaatgaaagtaacattagagataatcttatgccaccctcttattttggaggttaggaaaatcaaagccatgatttatggctggagcaaatgggtgactgatattggcatttactgaaattgaaagctctagagatgatcatttactgaaattgagagctctagaaatgatgtataggtgaggaggcagacagagtgaaggaagaggagaaatgatgagtcaagagtttgaacttgttgagactgagatgcctgcagaacattcaggaaaacaaagtccagaaaagaaatggatatacaggtcttgagctgaggagaatttaaaacgtgtgtgtgtgtgtacataaaatattgaaatatacacacatgtgtaaaagtatcactatgtaaatcgtaagctttagccatagccatgaatgatagattgatagaaagaatgtaaaggagacaaagggagaactatccaagtgtcagaagaaaaacccagaatgaggctccatggaagtcaaaaaataatgctttttttcccccaacaatgtcaaattcttctgagaagttcaacaagaaagacagtaaaaggtacctgaatttaaggtcctaaaaggtcattgttgacaataacatgagttgtttcagtggagtgatgggtactgaagccagattataaaagattaaataaatggtgagtgagagagaagaaaatggagactaagtgtacacaaccctttcaagttgttatttaagagaaaataaattagagagcaaagtgaagtaaatggaggattttattaagatgggcgtgactgttaaaatgccattggaaaggattcagtagagtggtggaaattggagaggtgagggtaaaaaaaaaagagggaagacaaaatatgcaatggcctttaacagaaattggcagaaaaggatcctgcagaggagttataggttttaaccccttaagttcttaaagggaatgggtccctttttaattcaaggaatggggagaaaagtctagcagacaggcagcgtcaagaagaatttgtagacttctgggagtttcaatggcaatgcctcaagcctgggaacagggtaagcagccctaattaggatttcttctcaaaacttgaagcatgaagaaaacatgaaagaatctcttgtgccttctataggcaacccagctgaagtcaagacatcttttaacattaagagtggatgccacagagccagtggcttatctgcctgatgaatcagttgcaccagcccagaatgaggtgcaattcaaaaaattcttgccccactagtaggctgctgtgtataatcctattctgagagaggcccacgcaagtgtggtgagagtaggagaaaggctgtggactgtggttgtattagtcatgggtctctagaggaacaggactaatagcatagatgtatatatgaaggggagtttattaaggagtattgactcacacgatcacaaggtgaagtcccacaatgggccatctgcaagctgaggagaaggaagccagtctgagtcccaaaacctcaaaagtagggaagccgacagtgcagccttcagtctgtggctaaaggcctgagagtccctggcaaaccactggtgtaagtccaagagtccaaaagctgaagaacttggagtccaatgttcaagggcaggaagcatccagcacgggagaaggatgaaggctggaagactcaggcaatctagtccttccacgttcttctgcctgcttttatcctagctgctctggcagctgattagatggtaccctcccagattgagggtgggcctgcctctcccaggccactgactcaaaagttaatctcctttggcaacaccctcacagacacacccagaacaatactttattcattcttcaatccaatcaagttgacactcaatattaaccatcacagtggttattctatgtattattgaacatgtttttcactaaaatgtgttcattcagttttccttaagcattaagtaatccattagaatgtttttgatgcaagtcacagactatccaatttgaagtagttcaaacactaagaaggcttatgatatggcaatgaagcagcaaagcaatatcatcaagaacccttgtgccttctctatttcagttttgtcatctttagaatgtcatgtgacctctttacagtccaaacatggtattggcagcatcagccaacaactgcagacacaaaaatacccagcaaagagaaggtgaatttcttcctgtatctcaattgctattagcaaggaagtttccagaagctcccaaaattgacttctcctcaggtcttattggctagatgtagtcacatgcccatccctaaatcaatgtctacaaaggaaatgagtccaccatgattgccttagcccaaacataattcactctctggggtccagagaggttgtcacttaccctgaactcatgacaaggtgacaccaggatgaaatcaagtctctgccctcaaggaaaaggggatgaaatggcttaggatagaccagcaactgtcacagcagaattaaagaacacgtttggcaagaggaggagatctggtcacaaatgaaggacctttgttgttagaataaaaaacattcttgtcctccaaaagattaaagataaggtcatcaaacagtgtttgatttcagagatatcttcaaagcctagctagtgaattcatttatttattaaacaaagttaatgggatatttgtatctatgagacatcaataaagttctaaagaaaatttcctaaatttaaataacagatttacttataagcaagtcttccaaaatcccatgagaacctttactttaaaaaataaatgtttacccttgaaaacattctcagtagtagaaaagaattgtcataaattttttggtgttacatttttaattgacaaatatacatatttatggtggacaacatgatgttgtgaaatttgtatacaatgagaaatggctcagcttttatataaccacactcacctctttaccccacccatttgtacactcccagcaactattaggctatcctccaattctaaaattttgtcaaaatgttatataagtgggatcatacagtatttaacctttaggggttggcttttttctatcagcctaattccctggagattcatccaagttgtcgaatgtatgagtcttccatttctttttattgctgggtagtattccatggtatggatgtgtcatggtttaactattcgtttgctgaaggcaaaccaagcttttatacacattcatcaacatgtttttatatgaacatgtttcaatatatctgcaaccaatgtccaaaagtgcaactgctgggtcctatggcaattgcaggttagttttataagtaagagactacgaaacttcttcagagtggttgtcccattttatattcccaccagctatgtagaagtggtcaaggttctctgcatccttgccagcattaggtttcattaccatattttagccatccagataggtatgtgctagtatctcactgtagtttctagttgcattttcccagtggctaacaatgaatatcttttcacgtgctttttgccgtcttatatcttcttcattgaagtgtttattcatgccttttgccctttactaattaaattttttacctgacttttttcttcatatattgggggtttagttgattttttatatatactagaaacaagcctttgctggatatgtggtttgcaaatattttctcccagtctatatattatatttccatccttttcacatgggctttcacagagctagagtttttaatttttatgagatccaacttaatcgatttttcctcttacgcatcacgttttggtatccagatcaacccaaagggaagccataggacaaggagacttgaagctagacattaaaattagcctccttaactccttaaaaaactaaacatagaactacatatgatccagcaatcccacttctggatagatgttcaaaggaatggaaatcagtatgttaaagagatagcttccactcccacattcattgcaacattatttacaatagccaagaggtggaagtaaactaagtgttcatcaatggatggatggatggataaagaaaatgtggtatatatacacaatggaatactattcagcctttaaaaataaggaaattctgtcatttgtgagaacacagatgaatgtggaggatatcatgaggagtgaaataagccaggaatagaaagagtaatactgtatgatctcacttacatgagggattttaaaaagtcaaattgttagaaatagagagtagaatgatggttgccagaggttgggaggagggtgttggagaggtgttgatcaaagggtataaagcttcagttaggcagaaggaataaggcttttagatctattgagcagcagggtgagtacagttaataaaaaggtattgcatatttcaaagttgctaagagtacatttcaaacatcttaccacaaacatataatgggtaagtgagatcttctgtctccttgggtcactttctcctgccatgtttcccagaaactttctctctagatcttttctatcatctctcttcttccagttctcaacttctcaagcaccaaaggacaattccaaggtgtctatttctttacaagatgcaggaatttaactccaaatactcacctgagacttagctcctggcctcctctttcagtatgcaaaaagagtttattgtaagaattttcttgtttttaaaaaaaagccatctacacctgagattaatgctgctgtttcctgagcatttcttttgttgctacattattttttattagacatataactccctctgccaacccatcatctgtgtcactttaaacaaaaaaaaccccacaaactgaaacctcccatagcaggaagagtctcattgaccaacaaagactggattcccattgcaaacactataactcaggtccatgagctatgagcttatgagtagctaatgagacatcactgggttctgcttgggtgactttagaagactgacctaaacaatttttttttttttgaaatggagtctcactctgtctcccaggctggagtgcattggcacaatctcagctcactgcaacctctgcctcccaggttcaagtgattctcctgcctcagccttccaagtagctgtgactacaggcgcgagccaccatgcccagctaatttttggtatttttaatagagacggggtttcaccgtgttagccaggatggtctccatctcctgacctcatgatctgcccgccttggcctcccaaagtgctgggattacaggcgcgagccaccatgcccagctaatttttggtatttttaatagagacggggtttcaccgtgttagccaggatggtctccatctcctgacctcatgatctgcccgccttggcatcccaaagtgctgggattacaggcgtgagccaccgcgcccagccagacaacttttaaagttcattctaaccttgagattcaaagggaccaccataatagtgaactaaagctttgctcactaaagtagtcagacccaatgtctatgaaataaagttgttcaaatccaagtcccaacgccctagacgtcatgggagacttaagaattcctttaagcagccattacagttcttctgcacttctattttatttcaaccccccctcctggtggcctctatcttcccctgctgctctggctcttgaccaccacccctccttggtgactatgatgtcactgctcagggacatcactcatttatcaccatagctcccagataggctacacttatcctgcagtgaagacttttcattgagacaggaagagttctctcatcatctttatagatattaagagtttcccaaaagcattttcctttctctctctggttcctaaataacttctacaaatatggctttattatcttcatttttcaggtttttttcaaagcctctatctcaagttgcttagagtacatgcacccagggccaggacagcagatatgaaagaggcaactcataaaatcaaatctaaaagcactcttttattatttgacttcttcctgcaggtgaattacctatcaactcaaagtactccctgaaaattagaagatagctttgtatgcttctgttctatatcaactttagaggctttcaacctgttcatccatctctatcattcttattacttctcccagaaggatcattgagtaattgggcaaatgagacatatagctacccatgacgccatgccagagttcccaatgcatgttcctgtgttcagagctccccaagatcaccctcaggctcaataatcttgaaggatttcacagaacttcagaaaactgtgatactcacagttacagtaatactacagtgaaaggaatcagattaaaatcagcaatggtaaaaggtacatagagcaaattttaagagaaaccagatacaagtttccagttgtcctctcacagtgaatttgtgtgaacagcttaattctcccagcagcaatgtggaacaacatgcacagagtattaccaaccagggaagctcacctaagcctttaggccagagtttatattgggagtcatttatatgggtatagttatccacccacatggctgatcttcagtctccagtccctctagtggtcacattgatactgtctggcccaatgtcagacataatggaattatttgcatagattttctggccccaaggcttctaggtaaacagacactgttatcagggaggatattctaagggcttagaggttacctccagagtaagggtcatcctttctttggattgtgcaggatgtgaacaatctgctgagctgatcctttactatacagtttcattggggccacctataattcttaacttaaaaaactatttcattcaagatgcaaaaattgcttaatcatcaacataagcatgaatcacattctagccattctcccctttaacttttcaaaactgaatagtcttaatctttgcagtgtgttcccaagtgacagtgactttattcctttggtcatttcccttctttattttaattattttagttgacacatacagaacagaactgcatccagcagtcaaggttcacctaatactataatatacacataatattaggaaaatatattgtgcccaaaatgtttctgtttatatctcaacatttataggcactctaggcaaaaggaatggacctatatcttcagggaacaatcaaggcttaggttcctctcctagctaaatgcaataaatccagtacattcaatatacacatatagttcagaaacgttaactataaatgcattactttgtgccttcactaacccacaaattatacctattcaaaaggaaaaacttcttcatgtcataaaaggagacacgaataatcaaaaaaccttaagtaataactataacatatgtaatagggaaaagttttaatatccttgatatataaagaacccatgaaaagaaaactgttaaatgtttaaatttttaagtggtcatggggataaacggagagtgattgctaatgagtatggggtttcttttttgggtgataaaaaatgttgtagaaatgattgtgctgatggttacacaactctgtgaatatagtaaaagccattgaattgtacactttaaattagtgatttgtatagtatttgaattatctcaataattatacctcagtggttatatctcaataaaactactattacttttttaaatggccaatctctctataaattaaattaacagttgaccagtatgtaaaatgttttttcgcaagtgctggtaacagtgtagaataatgatctctttcacacagacatccctgatacaggttgagtatcccttatccaaaatgcttgggaacagaagtattttggattttggatttttttcagattttggaatatttgcatatatataataagctatcttggggatgggacccaaatctaaacacaaaatttatttgtttcttaaacaccttatacgcatagcctgaaagaattttttttttttaaacagaatctcgctctgttgcccaggatggagtgcaatggtgagatcccagatcactgcaacctctgcctcctgggttcaagcaattctcctgcctcagcctcccaagtagctgggattacaggcacccaccaccacacctggctaatttttgtaattttcgtagagacggggtttcaccatgttggtcaggctggtctcgaactcctgacctcaggtgatctgcccacctcggcctcccaaagtgctgggattacaggcatgagccactgcacccaccttaaataatatttttagtatttttgtgcataaaacaaagttttgactgcgacctgtcacataaggccaggtaagaaattatatacttgtggcatcgtattgagaggtgacagtgtgctggcagccctcgctcgctcttggcacctcctcggcctcggcacccactctggccatgcatgaggagcccttcggcccactgctgcactatgggagcccctctctgggctagccgaggctggagccagctccctctgcttgtggggaggtgtagagggagcagcgcgggcagaaattggggctgcatgcagcactcacgggccagcacgagttccgggtagggatgggcttggcgggccctgcactcggagcggccggccggcaccaccagccccgggcagtgaggggcttagcacccaggccagcagctgcagagggtgcgccaggtcccccggcaatgccagcctgccggcgctgagctctaattctcaccgggcctcagctgcctccctgcggggcagggctcgggaactgttgcctgccatgcctgagcctccccccacggcggtgggctcctgtgtggcctgagcctccccgacgagcgccatcccccagctccacagcgcctggtcccatcgaccacccaagagctgaagagtgcgggcacacagcgcgggactggcaggcagctctgcctgcggccccggtgtaggatccactaggtgaagccagctggcctcctgagtctagtggggacttggagaacctttatgtctagctaagggattgtaaatacaccaatcagcactctgtgtctagctcaaggtttgtaaacacaccaatcagcaccctgtgtccagctcaaggtttgtaaatgcaccgatcagcaccctgtgtctagctcaaggtttgtaagtgcaccaatcagtgctctgtgtctagctaatctagtggggacttggagaacttttgtgtctagctcagggattgtaaatacaccaatcagcactctgtgtctagctcaaggtttgtaaatgcaccaatcagcaccctgtgtctagctcaaggtttgtaaatgcaccaatcagcaccctgtgtctagctcaaggtttgtaaatgcaccaatcagcaccctgtgtctagctcaaggtttgtaaatgcaccaatcagtgctctgtgtctagctaatctagtggggacttagagaacttttgtgtctagctcagggattataaacacaccaatcagcaccctgtcaaaacagaccaatcagctctctgtaaaatggaccaatcagcaggatgtgggtagggccagataagggaataaaagcaggctgccagagccaggagtggcaacccactcagatccccttccacaatgtggaagctttgttctttcactctttgcaataaatcttgctgctgctcactctctgggtctgcactgccttatgagctataacactcaccgcgaagatctgcggcttcactcctgaggccggtgagaccatgaacccactgggagaaatgaacaactccagacaggaggaacgaacaactccagatgcgctgccttaagagctgtaacagtcaccacgaaggtctgcagcttcactcctgaagccagcaagaccacgagcctgccagaaggaagaaactccaaacacatccaaacatcagaaggaacaaactccggacacaccacctttaagaactgtaacactcaccgcaagggtccgcggcttcattcttgaagtcagtgagaccaagaacacaccaattccagacacaatatcattactcaaaaagtttcagattttctgatttcaaatttttaaatcagggatgcttaacttgtaatatagtttggtacttttcaggaagacaatacagcaatatgtatcaaactttaaaattaggcatgttccttaacacagcatttttactgctagcacttaccccatgataaattacaaatatgtccccaattctttacttctccctatatccacaaggtttgccatgtaacattaagtatattcccactttgactcttgcttcagtgctgtaacttcttgtagcaatgagatatcagcaaatgttacacaagaagaggattgaaaaggtgcgcatttctgcttacattcttacacctcagtcatcactatgtgaatatgcccaggttagcctgctggagaataaggggcattagagcaagtcaaatcatcctcatagccccagccgacactcagtcattccctacacataaacaaattcaaatgagaccagaagaaccaccctcctgagcccagcctaaatttctgactcaaaatttatgaccatctcccgtatacaccatattccttaccattagcatattttagtccttctaaaaggacgcctgactcaaaattttatcagtcaactcatactcatgtcttatttgatctgagaaaactttaaaagtgaattttaagatatttgtttatattccttgttcacactttccttgtggtctttcacacttgctgcacccatctacctctagacaacaaattcattatggacaagaactttgcattatctttgattcctggtgcataacccagtgactagatgcttgttaaatgtctgttaactgaatggaaatgagatcaggaccaagagatctaagctctggttctggcttcataacttaggcaaatcacaccgccatgtttcaatcttctcaacctgtgaaatggtacaatatcatcttatctctcagcttcacaaggttgttgcaaaaacaaaatgatctaatttttaagtgtttcgtaaagtctaaaacattattcacccataggtcaagtctgttatctttattaaaacttaatctaataccccattaaggaattgtaattcttgggccaggtgcagtggctcatgcctgtaatcccagcactttgggaggctgaggcgggcagattacctgaagtcagcagttagagaccagcctggccaacatggtgaaaccctgtctcttctaaaaatacaaaaattagctgggtgtgttggcacacacctgtaattccagctacttgggaggctgaagcacaagaatcacttaaacccaggagacagaggtttcagtgagccaagattgtgccactgcactccagcctgggtgataagagtgagactgtcaaaaaaaaaaaaaaaaggaattctaattctctagaaacagagatgttctctgttgccagatacattaatataagaaagactgatgatattattaaaatctattttcaaaacttttctacatagataatagtaataacagtacttttttaaaagaatgaaaatcttgtaatattttcaaccattgatagaagaagctacaaattcaatgcaatctccatcaaaataccaccatcattcttcacagagttagaaaaaacagttctaaaattcatatggaaccaaaaaagagcccacagagccaaagcaagactaagcaaaaagaacagctctggaggcatcacctaggcacatagaccaatggaacagaagagagaacccagaaataaatcgaaatacttacagccaactgatcttcaacaaagcaaacaaaatcataaagtggggaaaggacacccttttcaacaaatggtgctgggataattggctagccacatgtaggagaatgaaacttgatcctcatctctcaccttacacaaaaatcaactcaacatggattaaggacttaaacctaagacctgaaactataaaagttctagaaggtaacattggaaaaacccttctagacattggcttaggcaaggatttcatgaccaagaacccaaaagcaaatgcaataaaaacaaaaagaaatagctagcacctaattaaactaaagagcttttgcacggcaaaaggaacagtcagcagagtaaacagacaacccacagagtgggagaaaccttcacgagctatacatctgacaaaggactaatatccagaatctacagcaaactcaaacaaatcagtaaaaaaaaagaacaatcccatcaaaaagtgggctaaggacatgaatagacaattctcaaaagacatacaaatggccaacaaacacatttaaaaatgctcaacgttactaatgatcatggaaattcaaatcaaaatcacaatgtgataccacctcactcctacaagactgtccataatcaaaaaatgaaaaaacagtagatgttggcatggatgcggtgagcagtgaacacttctacactgctggtgggaatgcaaactagtacagccactagagaaaacagtgtggagattccttaaagaactgaaagtagaactaccatttgatccaggaatcctaccactgggtatctacccagagaaaaataagtcattattggaaaaagatacttgcacgtgcatgtttatagcagcaaaatttacaactccaaaatcagggaaccaacccaaatgcccatcaatcaatgagtggataaagaaactatggtatgtatatatatatgtatactatttcaaactagactataaggccatagtcaccaaaatagcgtggcactggtataaaaaataggcacatagaccaatggaacatagtattccatcatatatgtatatatgtgtatatatgtaaatatacatatatgtatacatatatactccatcatatatacacatatatacgtatatacgtatatatacgtatatatgtatatatacacgtatatacgtatatatgtatatatgtatacatatatattccatcatatatacacacacacacacacacacacacatatatatgtgtatacatatatgatggaatactatgcagtcataaatagaaatgaattaacagcattgcagtgacctggatgagactggagactattattctaagtgaagtaactcaggaatggaaaagcaaacattgtatgttttcactgataagtggaagctaagctatgagtacaaaacggcataagaatgatacaaacggactttgaggatttgagggaaaaatcggagaggggcaagggataaaagactacaaatatggtgcagcgtataactgctcgggtggtgggtgagccaaaatctcacaaatcatcactaccaagaacttactcatgtagccaaataccacctgtaccccaataacttatggaaaaataaaataaaaatctttaggtactccaaaaaaaaaaaaaaagaaaaaatgccactgtcctgggttgaacagtattcatgtccaccagactctcagaacgtaaccctatttggaaatagggtccttgcagatgtaatcagttaagatgagatcatactggattaggtagggccctaatataatgagtgatgtccttagaagaaggccatataaagacacccagtggagacagccatgtgaagacgcaggcatagattggagtgatgcatctacaaaccagggaatgccaaggattgctggggctacagaaacaaggagagaggcgggaaacagattctccctgcaaccccctaagagggaacaaactctgctgactccttgatttcaggtttctgacctgcagaattgtgagaaataaatttttgttgttttaagtttaaaaaaaaaggcaaatatccagttaaatttgaatttcagatgaatatcaagtaagtttttagtgtaaggacgtcccaggtaacattggcagtatttttatcttctatatgtggcaaccttggtaatagaaggctttttatttttaatgccctactgctttctataggtttgaggatgtaagattggctgtgaggtgctgagaaatagctcaataaacggcgtatagctctcaattgtggaaagatatggatgcccaactgaaagccaggaagttagcactagcaaggaaggggaagaagacaagatgcttggcagaggcctaaggggcatgggagaggggatatgagggaaagttatgaaatgttatgctattttcttaaaagataaaataaaatcatccttctaatcttctacaagtgcatttcagtaaaatctacattgctaactaatgccttggggtagaagtaggtaaattctttctagagtggattctttcttggcattaaatgatatcaagtcctacttaaagtttgacacaaaacagccgacatgtagattatacgagtaattggagaaagtcttgcaagcaacagcaagcccacatatgacatatacttgcttcagcctctaacgggcaggtctgcaaaaccaccctgaataaatgtgaaccaaagtagataaggccctgcttagggctagtaactgatagctcctgagcaactaaaagcagagtgtttagactaagaccagactaaaatcactcactcactcactcactcatagaaaacaatacccatatgaagattttttttattattaaacattggtctaatgctaaaaagtttaaacaccaacagagcattgtaaacccactgccttgtgagttaactttaacttacttagttaactaactacatttttaacgtagtgtttccatttttaaaaacaaacttggccacttcacaaacacttcatggctaatcattttataatatagtttatttacagaaatgaaatgaattttggtaatttgaagcaatgaactacatcataaaacatctctgaaatctttttgaattgtcagttttcaaaacaaaaactcagaaatgtgattccattttgatgataaacacctgcaataaactaggaatattttttcaacccactctcccagttgtgttacacatcaaactgctatttggttaggtgggaaggagggggattaattgttgttaatggtttttattattcagaaagaatttaaatccgtgaaacctgcatttgtcaagcatcaagcgtcttgcagactgccacagagagtaccaaagttctggtgttttgctgatcctttgttttggacattgtttgactgttttaaatacaacagtttccattcagcattaactgtgaaagacacagcacaagaataccccagggctggtgtgagaaaaacatagcaggattatctgatggaacaattccgggcacagagtaagggatctatccatagtcactgaatgaataaatacttctgtagcttccctctaactttaggaaaaaatattaatgaaggaaaaatgaattctggattcattgagaacattttggaaatagtttaaatgatattgcatatgtgtgtattctaaatgcttttttgtattttctaaagaatattttgacacaggaaggggaacatcacactctggggactgttgtggggtggggggaggggggagggatagcattaggagatatacctaatgctaaatgacgagttaatgggtgtagcacaccagcatggcacatttatacatatgtaactaacctgcacattgtgcacatgtaccctaaaacttaaagtataataataaaaaaaagaatattttgcaaataaagtaaaagaaacacccttgattgacagtattccatttgtgagccagtggttagacatagaaaatgatggattagggacagcaggtagaccaagagttcccaaccttggctgcatgttaatattacctcagttgcttttttagaatcccaattcccaggtcacaccccacactcatgaaatcaaaatctgtgtgggtagaacacaggcatcaatattttaaaaagtgatttcattatgcgatcaaggttgagaataacagatatgactctaattcttctcttgtcccatggaatagtgtacagaaagctacatttgggacaagcaatggataaaaattcaccctgtgtttctgagatggtggggtattgttcctcctggataaagaatctttcacctttttctacactgtgttttcaactgggaggtgaataaagtggaaacaaaaaataaacataattcaaaaaaagggtgagagagtggggctaaggtaagctgagtgttcaatatttcctcttccaacaagattcctcttatcatgctctatttgacataatcttataaaagttaatgtttaatagaaacatacaaacaattttaagaaatctctactagcattttgtgtcagggaaggtcaaaactgagacccactactctggtgtcttctgctactggatttatttgtgcctgggttgaccatgagggagtcattggcaactttaagcagcagtaggaggattggccaatccactgtgcccaaattaccagagtgactccatcttgaataggggacggggaaaatgaggatgagacctgctgggctgtattcccaggttaggcattctaagtcacaggaaaagacaggaggttggcaggactgttatcacaagatacaggtcataaagaccttgctgataaaccaggatgcagagaagaaaaaaaaagaaagcccaccaaagatggtggctttggccaagatggcaacgaaagtgatctttgatcaaccccactgctcattatatgctaattataatgcattagcatgctaaaagacactcctaccaatgtcaggacagtttacaaatgccatggtagtatctggaaattaccctatatggtctgaaaggggaagaatggtcagttccaggaaatgcccgcccctttcctggaaaactcacgaataatcaaccccttgtttagcatatgatcaaaaaataaccatcaaaatgccaaccagcagccctctggttgttctctgtatgaacatagcctgttctgcctatggagtagcctatcttttatttctttacttccctaataaacttgctttcactttattgtgtggacttgtcccaaattctttcttgctcaagatccgatacccctctcttgggatctggatcagaatcgctttctggtaacaaaatctcttaagcccccacaagtgagagggatgagacttagagggaaaagctcagggactccaaagactattcaatggaaggtcctctgtgccctgctcttgcggttgtaagaaacagagtcccatggtctatctcagatgatgtctttctgggtgaatacttggtacaataagagaaatgtgacttccacaagaatccccaaattgtgaaatggtctaactcagcaacagctgtgtattgaacctctgcccctagagtgacatggcaatgctccgtcttgctttctacctgctcagcaactgctgagcttatcaatactgcgtcttctcttcctcattatgcctgctttctcaagagtacagcttcctatgccttcctagggttctcactgtttttcatctccatctggatcttttcagcatttgctcccaatgcccaggtaaatcaggggcacctaggcatcagtatcttctaaagctccccagaggattcaatgtgcaaccaagcagataaccactgcaccaaagaacagtgggtacaagtaaggcaacttggatttataattaccaccttagcccaaaaggaagaaaactggagaaggtaacttataatgcctgggaattctgttctccttgcattttattttaattcagtgtcttgtttctctatctatacagcacacatttattcacatggattttagtattttaactgtgttgtacttaaaggaaagcaaacatgccttctgaagtgatggtctttgagccactagtcaagagattggggctctctaatgagccaagactcccatctagtggtaaccacctctgaattgcaaatagaaggtttctcaacttttattaatgacaaaactttttgggaagtggctggtcaatttcaataactcatttgcctaaaacgaaatgcacctatttgtcaaaagacctttgccacttccaatctgtgtgtgtaaatatccccgggataaattattgctatttatttgaacttatgaaggaaaaccaacttcacttcacgattctgtcaaataagtgtgttttagtgaattcagaggttgtgtgactgataaaagtaagtggttattatgaaatagttcatacacatccaaagtgaaatgactaatgataaaaccttagaggatgctgtgaggtgagtggtggtccctgaaaaagtatgtcagcatcccaatccccaaaatctgtgaatgtgaccttatttggaaatggggtcttggtccatatcattattatgttatgttaagaatcttgaaaacagatcatcctggattatccaggtgggccctaaatctaacacaagtgctttataagaagcacagagaagaagagaaaaaacagggagaaggagtcaaaggccatatgaagacaacagcagagattggaattaatgcagccagaagccaagaggacatctgaaaccaccagaagctgaaagaggcaagaaatctccactcgagccttcggagagaacatggccctactgacaccttcatttcagacttccagcctgaagaactttgagaaaataattttctgttgttttaagacatccactgtgtggtaatttgttacagcagacttaagaaagtagtatggtttcctcttcctttcttttcagtacactccttcagaaaacaaaaatagcatatttggaaatgacctaggtacctaaagttttttttaataatatacatataaattcattgctctacaatattataggatggtattcaatcaacagcataaatacttcactgtctacctacaattttcaaaggtattttggatagcaaacttttcatttcagaagtttttcactacaaataccttaactgaaagactaatcaactaaaattcttctttctaagatagaacatgaagcaacaagagttttgcctaaatatggatgagtgtaatgagaataactcaaatttcatgtccagttgggacagcacagtcaattcaacaggaatgtttatgagttgtttatcatgtgaagtatttggaaggtatgcaaacactaaaaacaacaatgtcaatacaattaaatggaggcattcataaaactgttgttcagatcagcaggtaatcttgtaactgcatatttgagaatttcaaggaaggaaatgtacaaataatcaaaggcagaaaattcccttcaggaaatgtggtatccacatattgtatgacaagcttgcttttactgaataatgcatgaagatgtctgttttaaatcgttcactgactacagagttgacaaataaccactgaagaacaatgggactgggcaccagatgcctttgtttcatatctgactctgcgaaggctgtttctttcctagggaactgggggttctatgtaacatgagactcaagcaaaaagtgtggattctgtggtatgctcatgggatggttccagtaaatgtgctgatagaattctggggcccaagagttgacgatgggtgccattaaagtccagacctggtgccgtagcactttgatgtgtcaaaggcttaggttctgccatttttctgaacaaatatattcaaatagaacactacataaaaatgtaaagggccttgtagggtcaaatgaaagtctgagcagagaatgaacaatatccctatgagatcaaagtgctgtctttgttgaattaattccattattttttgttctcattgttttcaaaacaattaatagatacactgagaaagaaggaaagcaagagagttactctgataatgatggctctcatttataaatccatgaaaagtaatatcaattttctttcttaatagatgagaaatctaaaactaagaatgggtgaggaacttgccccaatatcacagagccaataactaaggtgcttctctcccagaacctttgctacttcctggctgatgccaaaacactgcctaataaggacctcaaaaaaaaaatctttctaatgaactgaccattggtcaagtgtctcccctctccagttccaacagactctgctggagtcacaaacgacaaggaaccttgtctcttcatctctttatctgcaatacctaccatggtgatcattcataataaagcactcaacatgtgtttactgggtgaacagataaaaggtacagaaaagagggaaagggctcaggaaaaactacacagaacatttcagaagtatttgccatttccatgtggaaatgtcaatcatagataaatatcccaatcatgatgattcataaaatatattcagaggagcccaatgttcaggaaatgcaaactatctgcagtgtgaatttggagcacaggtttgaaaacttagaggctgatcgaaaaggaaatttggtttacaattttgtaattatcaggtatatgataattaattatcctaaagtgatattgaaggcttggcctgagtctgatgacaatattagaaatctgagtgagaaaatgatcagcagtttgactgtttaaaggtttgttggttgttccttaccttttaaaactgagtctctagccgctagctactgtgtcccagggggccttgtgccctctacctcctgttttctctgaaaacaaatgagattttttatactgccttgactctatacagattttcctgctcttaagagacaaacagaagagtgatacttcaaagctagaataaatgtattttattttattttatgttttcagaccgagtctcactctgtcgcccaggatggagtgcagtggcgctgtctcagctcacagcaacctccgccacccgccccactctctgcgattctcctgcctcagcctcccgagtagctgggatttataggtgcctgccactacgtccggctaatttttgtatttttagtagagacagggtttcaccatgttggccaggctggtctagaactcctgacctcaggtgatctgtctgcctcagcctcccaaagcgctgggattacaggcgtgagccacgacacccagccaaataaatgtattttaaatctgggatatatgttccaattagctagactctgaaatttcagactttagcttcagtcagaggctattagaactattccaaaaaatgcacagaattaataaactattgacggatgagtaagaaaaaaaaactgagtcttactctgccatcaaggcaggagtgcagtggtgcaatcacagtttactgcagcatctacctcttgggctcaagtgatcctcccaccacagcctcccaagtagctgggaccacaggtacatgccactatactcagctaatttttattaatttattttgtagaaacgggagtctccctatgtttcccaggctggtctcagactcctgggctcaagtgatcctcccgccttagcctcccaaagtgctgggattacggacatgaaccactgcacttggcctgttggttgttcctttaggatataacaattaatattaaaggcacttcaatataaatttcaaattgtaatttaagttttttccagggtcactattttgtatatttatatttttagtttattctgttttgttggtagcacccaagtattccctaggctgttggttgttccttccgacagtttctaggacagaaaatgggtctttctcccaatagagataaggaattggtaaactgccttggatgccaagatattcttgttttatgtacacttggcagaagtcatctacaaccatctgcagactctaactcttcactggggcccacagtcatccccactgttgaatgcacattgcactcctgttctgaaggaacaaaggaaggacaggaaatgagtgaacccagtgaggaaaaagcttttaagatatgtatcaaaaagaaaaaggaaggccggaaccagtggcccatgcctgtaatcccagaactttgggaggctaaggtggacggattgcttgagcccagaagatggagcccatccaaggcaacatggtgaaaccctgtctctaccaaaaaaaacaaaaaaaaaaaacaaaaaacaaacaaaaaaacaaattagctgtgtgcctgtggtcccagctgctcaggaggctgaggtgggagaatcgcttgaatctgggaggtggaggttgcagtgagtggacatcgtgccactgtattccagcctgggtgacagtatgagactctgtctcaaaaaaaaagaaaatgagaaacctagagactgaagaatccaattctcagtattaaaagatgggaaaaaaataacttgggtgacagctattaggctgaaataggcacaagataataaaacccaacatcataataatgaggaaaactagcttgtgtaaaacagaagatgacagttggaagattaaaaaggtactgcctgttgttgctaaaaggtaaaaataaggggttctgtgacatgtgggtgcaaaaggagctattgagaggcttaaaggagcatttagagctgatacagataatcaaagtttctgttgattcctatctgcatggctggacttactgatcccaccaaacattcttccctcatgctccatgagttttcaatcctttaacttctaactggaacaccatgcaccctgcctccttttaggcttagtttctgccaacagccagtcctgaggatccaggcaagtgaccctgtgttatctttccgctctcccttctctccttcgttcatcaagcagcaaccgctactttcagtgcttctctgcacacggagtatagacaggttccgagtatgtgaagctcagcttggggtttgaggagggtgtttaaaatcactacctccatgcctcttgaccacttccagatgaaattcaagaacaatcaaaagataaacagaacagcactgaactttgcagacatacttttttcgcatggtaaccctgtggcctggggcaatttaattgatctctctgtgctcagtttactcatctgcaaaatgagcatataggcatacccaccccatagagtttctgtgagaataaaatgagatactgtatgttcagcagtcattctgtgctagacaccatgctaataactgaataagtaagcctgttttttttttattataattgttctatttatcacccataaagtctgtaactctagagcctgagtggaaactaaataagggatgtgtggccactcattttttccttttgatccctgtcctgtgttctttgggggcctggacaggaaaagaaatggtagcaccagagctgtcaattaatagagatgaatagtagtcatggtgggtgtcatagtaggaattgtgccactagtagtagaagctgtagtaacagctaatacagctaatacaactccttgggttgtgccaaggagtgtgttaacgacacaaatctccatgcattgctcattgccactactcttaaagctagagatgtgtgcagccttagggcagttatatctcctgcagcaaaatgcatccctatccctcatcagtaatttgagatgtctgtgccttcctaaggatctttcaggatactctttcaacctactggaatcctaatttgagtgctgtcctaagaatgtaaactgacactgaactggtggttttccaactgcactgtgcacacaacagagatttccaaattccacagcacctccctaggattgccagggctggtggcatgatcaacaatttgggttctgtattagtccatttttatgctgctgataaagacatacccaagactgggcaatttacaaaagaaagaggtttaatggactcacagttccacgtggctggggaggcctcacaatcatggaggaaggtgaaaggcatgtctcacatggtggcaaacaagagaagagagcttctgcagagaaacttccctttttaaaatcatcagatctcatgagacttattccctatcatgagaacagcaaaggaaaaacccacccccatgattcaattacctcccactgggtccctcccacaacatgtaggaattgtgggagctataattcaagatgagatttgggtggggacacagccaaaccctatcaggttccaagactcaaaccctcttcacccagagtgagtctgcattcatctgtttcaacattgtcctctcctcatcatctcactgagaaaactttgtagacaaagagctcacagttttcaaatgactgtgaaagccaaagcactaaacttggtttcctcctataaaatcacaattctaaaccctctgaaggatttcatcaaccatattagtgcttaactcctgaaggtttggaaagccctatgagattttcaaaaatgttccctatttttccctatgtgaatacaaaatattatttttaacttatcctctcattcttctatctgtatctttatttatgcaaaactatccatatttttgatcaggtaaaatgtttggcatgcccaaatttggaatcttcttttatggttttgttttttgtgtagttcagtgatgagaggacccagcttcaagcacataaccagatacccattttttatgtctacaagtaagagcattttccaagaacactcaagtctggcagtatacactttgaaactcacattgtagctttggcaatcctgttttatgcacgtgatgctgcagtttatgtgcaatcgtgctttccaagacacggaaactcctcatggctgtacccatcagtccagacctacgttggttgggaaatcaaaacactgtcaccatgactgagttatctgtctcttgcttccaagtgggcccctttgttttaaagcagtggtgcttaaacaccagacagactcatctcatgctgacgtacatgtgaaattctcgcactacacaatcttggatggcttcacgttgtaacagaaaaaccaacccaaccactaagaaatccagttaaaacaatgctttaatgtaatcttttttttttaatgcagtggaattgaggaaaggatgtgtaagctctgtgttcacgaccctttcagatcacaccctatgtttccctgcatttggcaggtcctgatctgtacccattatattaaaagtgtaactgtaaatgcatgtacatatatatgcttatacacattatatataaatgtatatatatcatatgtatgttttatgtgtatagatgtatctgtgtgtatgtaaatatatattgtgcatgtgtatgcctttgtgtgtatatatctgtaaatctatatatatgtgtatatgtagtggaggattgtgagacctcacaagattgataaagtatcaaacaatgcctgtattttttaaaaggagctgtttttcaacatatagagaaataatgtcaattcctggattaatactcttttagaaaaggccaattttcattgatttcaagtagctcatgttattcagtaacaatctcagccttcaaaagtagccaaaagaaaagcagaataaatggtctcctaaataaaatgacctgtggggcccatcattgactaagtagcctttttactcatctcatacagcctcttcctaataaaaatgaagcagcatcgtgagaacagtagggagaaagggtgaacagacagaggtttacgggtcaggacagagtaccagggttaggacagataccaggaaagaggaaaagaacacactgtggaagaaacagggcaccagcttcacacttgtgcctcaggccagctttgtcaaagtgtcctgagtacatgaggtatcctctaaacatttattaaccaaatgcacagagaggcatgttgacagggatttagcgtatgacaaaggtggcatatcaaacccatgggggaaaggtgctactcaataaatggtttggagacaactgggagccaactagaaagaataaaataaaattggattcatacctcacattttatactaggacaaattacaaatggatcgaatattttatagtaaaaaataaaactataaacattctttttttaaaagggataacttctttataatcttggagttgtaaaaataaattataattttgaactagggaagatctttctagccataattcaaaatatataaatgaaaaaagaaaaaatgataatttgatgacaaacttcttcatggacagaaacattaaaagccaatcaataggaaaatttgaaaaaatatatttgaaatttatatcacaaaaggctactctccctgatacacaaagatcacctagaaatcaacaagaaaagaccaacacaatatagcaaaggatataaacagacagcttagagaaaaagagtataagattaggttaaatcatatgaaactaattgttaaaaatgtttgaaaattggcaatttcaaatgatttaaacaaatagctatgaaacatacgagagaatgttcaataacacttataagaagagaaaggcaaattagaacatcactgttggattaacaaaaaaagaatccaaaaatttggaaactcactatgtggtgagctgtggggaaacagaggctctcacacatcattggtataaattaacttatctttggcggccaatttggcatatctattgaaattacatatatatatataagctttggctaagcaattctactttggagaatgtatcctgtatatatacatgagcaaaatgatgagtgtacaaagttactcatttcagccttgtttataacagcaaaagagtaggaatacataagcaagtgcctagcaatagggaccagttaaaaacataatgagtcattggtacaatgactttctatacagcttgtaaaaaagtaagaagtttcttatgtacagacatatctgtaagatctccaagaaatactaagtgaaaaaattaaatacagaacagtgtgtgttgtatgttaccctctgttgaaaataaaaggaagagaaataagtctctatattcatatttcttctctatgcataaagaaattctggaaggatacaacataaaaaactaataataccagttacatagagagggagctggaatggggaacagaaatggcaaacaggccaggtgtggtggctcaggcctgtaatctcagcactttgggaggccaaggtgagtggattacttgaagtcaggagttcaagaccagcctggccaaaatagtgaaaccccgtctctactaaaaaaaacacaaaaattagctgggcatagtggcatgagcctgtagtcccagctactcgggaggcagaggcaggggaatcacttgaacccaggaaggggaagttgcagtgagctgagataacatcactgcacttcagcctgggtgacagagtgagactccgtctcgaaaacaaataaaaaattaaaaaagaaatgaaaaatatattttcttgtcaagcttttaataattttagcattttgaaccaggtgaatgcattatctattcaaaacaattttaacttaaaaataaataaatgagtcttatgactgatcaacaaaggatttggagtagatgcttgtttatatcatttatacactagatcatctacataagttgtgggactctgagaaaattaaaatatgaggtctcttgttataaactttttaagaacttcaagatggcagcagcacagcattaaaccaatcactggggcccttctaagaatgggtcaggcacctgtgaagttagccctggttgcacacaactgtactcatcagaatataaaattcagaatactaatgtcattcccaaagggaagcaactggcttctcaaaaacccaggcagcagaagtcttggaaaaaatcatttccctcgatttcacatacacttcatgttctgttggttcctaagcaattaacctgaatatatacgggtgctgatcccaagggattaacatacacatcctaaaacctcaagctttggagactaaccatcttcgatcacaaatttgtgatcatgcaaaataatagaatcttaagaaatggcctttgtatacatagtcagttttttgaaataataagtttttattttactgcactcaattaaattgtgaaacccaaataaagtctggagcccaatgtggtccaatctcaatctactgctacagtcaaagaatcatagcttagcagccagaaagtactgaaagaaacttccaaggttttctttttcagcttcttaagaaaatgccaaagaaggaaatatattcttaatgcccagaaaaacacattttaaattctctctcatcactacctctattaggctcctccataaagctattaatagtagctgcttcccaaaactctctcctcccgtttacaccccaccttcacccacatagattttctgttccttacctcatttctttctacctctactactcttccctcttctcacttattcaaatgtgaatcatccatttctatttcttgggtaccccaattagagtaattgtctgaattataagggttgggttaggggaggcagaactttagagcaatgccagaattgtctttcatgggcaagagaagggcaacgagttatgcatactcacaaataatttctgtccttgttacagttgcagttatcaacactgtactgctaacagaatttcttccaaaatgactgtagcatattcctcaggaaattcatactgacaattgttttggaatgaagaaatgaagcacaagtactctatcagtatctaaaaaatgaagccaacattctaaataatcttgttcaattaacatatggtatttattagctttatctccaaaagataaaggctatcttcttatgaaaaacctttttcccatctcttctagaatcaggaagttcagacaaatttacttgattttctgtgctgttccaactagcccaagagttactatctgtgactttggtactgcttatgtttatctaccattgctccattacttcaaaaaatgcaaaacaagacttgaacattttgtaattcaaaataaagacaagaacagccagattttctttttagctgtcaacagaaaaattccagcaatcagtttgaatatctcatataattaaatgttgaggccgggcacagtggctcacgcctgtaatctcagcactttgggaggctgaggcaagaggatcgtttgagcccaggagttcaagaccagcctgggcaacatagggagaccccatctctacaaataacttaaaaataaaataaaataataaataaatacacattgaaatcatttttaaaggtaatacatatgaccctaaaatgatctaccctgtggtaaagagacaatggcacttggtaggctgatggatcataaaccaaaatcctatccaaaagcttcatcactcagaacacttgataatctaacattagacgggccacatggcatgtgcacatttctttcattcctgcacacacaatatcaaaagggctgggaagaaaagcagcattcattgagtgacaattacactacataccctattctagacactttgcatactgtttgtaattcatgtttctcaaagtaccctgagagtttcttaaatctacagaaacctgggttgtcattaaatatacagcttaccaggccccacccctgaaaattctgattcagttgggctagattggggcccaggaatctgtgttttaacaaaatgtactcttcattgcaatgttgtaaaattattttccttgtttctgtcttgcagaagcaaggcaactgtgagaattaaacaatttatcagggcacccagatgacacagggagagctggatattcaatctcaagtaggttggctataaagccgactttatcactgggccatgccaaatcccagtaaaactccatttgcactctgactgaaatagtggcttcagttccccatctatagcagttctagcttctcactgcctgttttccctcccaccacccgcccataaaatccagcactgtataggctcttgaattatattattggttattatatgataaaattttgcattgcaacttgagcaggaagacaaactaatgagaatcacatcctattttctaattgtctcaaaccatacctctataaagtaaaaagagttgattgaaaccaaaatgtttgggaattacaacaagctattcctaatcgacacaacttgtcagaaatttggaggctgccgtcagctcagtagcttctcaaacaaagcagtatcagagtatgttttgagtccctgattctttcaactgggtagatgcttctgtacgactttacattgttttatttaaaagctgtgctttttttttctccgaaactagtgtatttataggtgctacatgctttaaaagtctctgactttgaatccctgattctttcggctgggtagatgcttctgtacgactttacattgttttatttaaaagttctgctttcttttctctgaaactaatgtatttataggtgctacatgttttaaaagtctacaactgtgaaaaatgatgtaacactgaaacaagcaaaaccttgaaggaaagttgaaattgagattgtccaaaaactcagccagtacatagtgtttccgcctactctgatttttcagcagttttgtgatttcttttcccttgtttgtttttgagtacactcatcagtatgtcccatggcatagtgtctgttttccaaaaatccagaaacatgagtcagctgttcaactattatatacaaatttggtaaagtaccgtattcatggaatctgagtgtgttttccaggaattacgtctccagtgcccccacatgactgcctgatcagcctgtgatgcctctgaagtgttctgcacctactttctaagggaaatgttgtcacgacagataattatggaattgtgggcttttagttattcagaataaatctacaaggcaatagtttaatgaatttaatatgctggttcatgtaaaatgtcatatgccatatgtaacatgactgtaacttaaggatattcttttaactcagtaaacttggtagaaaatccttgtatgaacctgatacggattaaactgtgctctctcaaaaaaaatatgttgaaatcctaacctccagtaactcagaatgccaccttatttagaaatagggtaattatagatgaaattagttaagatgaggtcatgaatgaattctaatccaatatgactggtggacttgtaaaaaggaggtattgggcagtcccacagaggctggactgcctggctggtgcatctttcctggtctgcaaaagacaagaaaataaaattaaaaagggaaaatgggacagacatagacatgcagagagaaaaggttatgtgaagagacatccagggagaagatggacgaatgaaaatggaagaagagattcaaattatgctgccacgcaccaaagaatgcctgggttcaccaaaagctaggaaaggacaaggaaggatgctacccagatgcttcagagtgaccatggccttactaaccccttgatttcagacctctagcctccataactgtgagactaaatttctgctgttcttaagcaactcagtttgtggcacttctttatggcagctctaggaaacaaatatagagcccttgaaggtactttcagctggaaaatgtcagaggcaggcacaactaaactgaggttcctgcttaagtgaatttattcagcacaggactttaaatgccatttatatcatatgacttccaaaggtattatctaccatcattaccacttcccgagctccagaatcaaatctgcaaccacccgatgggtagcttctcttgcctaatagcatctgaaaattagcacaaccaaagcaggactttgaattcattgcctgcccatacttcccctagtctactgcatctaagtaaagacatcaccatctactaagttatttaaagaaaaacccgggagtcatcctaattccttcctgcctacccaccatatccaatccatctgtgtgtcctctaaattctacgtccaggtcagtttcctgggagacacattctgaggtggagattagcatgcagaattgttatcagggattgccctcagaatcaacatccacagacagagggagaagctgaactgcaatgcagtcaccatagggacctcagttcatcctacaaagaactctggagctgtgagggcccctatcttgagtcatctttacccccactccactgaccagttagtgagtgcaggtcatccctgataagggaatgtggccttggctgacatggttctttttggcagagagcaattcctggagagagtccttagtggagagccatcagcctccaaatttttcaacagctaaggtaataagtaccttggttcagaaaaaagatctggatggcataccacagcatctgctatactagaagagaaagaagaaatatcctgaccagctaaatcctgtaaaactaaatacctgtgaaaattcaggaaaactaatgattaatttttttcccatccatcccctccattttcccactcagccagtctttctgtgttcttaattacaggaggtgatgtgaaagagtcttctagaatgaatttccatcagctgggtctttctgggatgctaagaaaagtttaggtttataaagaatgtttgagagaaacagagagctagagcaagtgcctcccccaaaaccttgaaacaagattgcccccaagatgaagagagaggagacacaaggaagatgatgacagcagagaagtcatgggccccaacaaaagggcagaatctaaattgggctgcatggacagggacaagggcaaacatctcaacaaaaactcccatgaggagtactgttccagtgatgtttgattttcaaactcatttcaggaccacattaccttgcttgctccaactttatagtaagtcttgaagtcaggtaatgtaatgtaattcatccaactttcttcttcttttccaatatttttgaaatgttctagatcccttgcatttccatatattttttaattcctttgtcaaattctacccttccaaaaaaaaaaaaaagcctactggaaacatgacgaggattgcattgaatcagtagatcaatttgatgagaaataacatctcaacaatattgaatgtttcaatccatgaacatggtatatctccttttatttgggtcttgtttaatttcccttggcattgctttgtggttttcagtgtagagagcttatatatttatttataaatacattatatctttatgttattataaatgcagttgtttttatttcatttttcaattatgtactgctagtatatgaaataaaattgatcttttacattaaccttgtataccgtgattttgctaaattcacttatgagttctagtggttgtagaactcttagaactatttatgtaaacaaccatgtcatttgctaataaagacaattttactttttcctgtctgctctttatattagtatttaacaaaatgcatttcaacttattcaaatttaatagttttaattaagagaatggtattattaatgttcatcaagataactcatttttcaaagcactcaagaacaacagattaaaactgtcatttcagtcatcaaattttacttttgctagtttgtgcaaaaagagtggcaataaagcaaaataaaattttgtctttaatgaattgtgctagagaaattcacaattgctctatagaggtgacatattcatcataatttcaaataatgagagggattgctgattagtagtataaactgaagaaaacttttggagatcaagatatctaagctagcctttgaagaaagtttagacagtcaaattagtggtaggaaagatagaggcataaagtaagcaaaggtagagggagaaattaacaaaacaagttccaaatatagaggcagagaacaaatcatattgttatgtatcagtaacataataacagaaggtctcaaatgatcggctactgagtttggattttatggtctacttatgtaaaggtttttaagtagtgaagaattacaagaggaaatcttccaactagaccatagccaaagaaaggttgagctctgagaggagataatatgtataaatacttgtacagctaacagttcatgtaagagctgaacagttttcccatatcagtgtttttgcaaagccaaataaataattaatgttcttgaggacaggctactaacttcatttaaaatgcaacagctggaagttcccatgtctaatcctataagaatggcttaatataaggctgatacatagttaacattcagaaatgaggaagcaatttctgctatgtggatgaaatgttccaagataaaaaaaatcttgaattctaatgctttttaaaatgctttgatatatagtgctaaaaactcacaataaatatattaattacagagtagaattcatagacagttgtatctatcttgatgccatccaaagggagtatcacctttaaaatacacaaggaaatgcttcaaggaatgagtagcagttgatccaaaccttgtaaggttatccatttctgggcacaaatttccttgtattctctcactgccttactctgctatataatgtcatggtctacaaggctattgaaatagtataaaacaaaaccatactagtctgaatgcctggagcctccatggccatggagtatccgtagattccctcagcccagtgctaatacactgctctaccagaaatgtgcttctctccattaagcagtatccatgtcttcagctcttggggaaactatctctggtacagtgctagattaggtccccccaataggacacaaatttttcccacccattcaagaagcagtcatttccatttggtcactcagctttccatcaggaaaactgaagccactctaggtatttcaaccagtaataatttaatagacggactcagggacttacaaaactgttaaaaagactgagagagcaacagtcatggaagctttcatttacagtcaataaatcaaaaagggcatgaatttaaagaaatatccgctagtaccagaggggctgactctcaggagctcacccagcaaccatttgcaaacctcacttctgtcacctgcctgctggtgcaactaaagatcagaggccctccttttctgtttttccacattcacatatgtgcctcacattgggataatctaaactggatcttgctgatgaggtaaactgggaatgtaatttttagcattccagccctacaatgtagggtgggacttagacgggcaaggatattgctgaaaactaatagacaatatcgagcacatctttctttacctcataacccatagccaaaaccactccccaaaaatactcattcttccacagtattctcactgtggtgatttcccttcagaggcgcagttcagtcttctttcttttgcattctgtgttctgccagtccttcttataagcatgtctgctccccaatggaaaccagcatcctctacatctgatcttccaaagggctacttttccagagtttgaataacaagtgtatgcattattgcaggttcaaagatggagaaggaatcatgtggcgagactttcactaagccaaagattaagtccctaacatgaaaaggctaagttgtgcaatacacactgaacagtgtttcagtgaaccagcctatgcacagaaaaccaactatgtacagaaaatccagacataggccaggcacaatggctcatgcctgtaatcccagcactttaggaggccaaggcaggaggatttcttgagaccaggaattcaagattagccaacaaattgagatctcatctctaaagagagaaagagggaaagagataaacagagaaagaggaaagaaagaaagaaagaaagagaaagaaagaaaagaaaagaagaaagggaagggaaggggaggggaggggaggaaggaaggaaggagaaagaaaggaaggaaggaagggagggaggaaggaaggaaaggaaggaaggaaggagaaacagagaaggaaggaaggaaggaaggaaggagggagagagggacggacgcagggagggagggagggagagggagggaaagaaagaaaagaaagaaagccaagaaggctgatatatatttaacattcttattatgaataataatcttaacattcatatttaacatactttggcatattccaacccaaagagaatccacagagcagatagatttgggagtagcttatcctcactattcccactcatcctcccctaccctttgaacgtaccagctttacaataattctgtatgtgtctgaatattcatgtgtctgactctctcactaggttgtaggtactttgctaagctttgtatctttgctacataatatgatgccaattatatagcaggatttccatgaataaatggaacggtaagatggagcttgaaaagttttccaccacatctccaactggttgcttaatgttcctgtgaatatattgcttagccattcagacaccacatatctaaaataaaattcatccgttctttaaaactttcttcccttaaggggttagtagtggtttttaacaatgtggttcatcagaaaggtggaaaaatcctaaggtccagatgtgttatggatccacgtgactattgaaaacatttaggaagagatgtggagataaaaacagtagaagtaaatatttttaggaagatagaaacgaaaattgctgggcattagctagcaagtatttgtggtctagccagaagtattaatggcatttttaaagtatttgaatatctgatgctattgaatgatagtataatggcattcccagagttatttaatattgatataaaattccagcttttgcccatttagtatgatattggctgtgggttggtcataaattgctcttattattttgagatacattccatcaatacctagtttattgaaagtttttagcatgaaggggtattgaattttattgaaggcctttcctgcatctattgagataatcatgtggtttttgtcattggttctgtttatgtgatggattacatttatttggtatgttgaaccagccttgcatcccagggatgaagccaacttgatcgtggtggataacctttttgatgtgctgctagattcggtttgccagtattttattgaggattttcacattgatgttcatcagggatattggcctgaaaattttgttttggttgtgtctctgccaggttttggtatcaggattatgctggactcataaaatgagttagggaggagtccctctttttctattgtttgaaatagtttcagaaggaatggtaccagctcctctttgtacctctggtagaattcagctgtgactgtctggtcctgagctttttttagttggtaggctattaattactgcctcagtttcataacttgttattggtctatttagggattagatttcttcctggtttagtcttgggagggagtatgtgtccaggaatttatccatttcttctagattttctagtttatttgcacagaggtgtttatagtactctctgatggtagtttgtatttctgggggatcagtggtgatatcccctttatcattttttattgtgtctgtttgattcttctctctttttgaaaacccgcacaagacaaggatgccctctctcaccactcctattcaacacagtattggaagttccagccagggcaatcaggcaagagaaagaaataaaatgtattcaaataggaacagaggaggtcaaattgtctctctttgcagatgacatgattgtatatttagaaaaccctatcgtctcagccccaaatctccttaagctgataagcaatttcagcaaagtctcaggatacaaaatcaatgtgcaaaaatcacaagcattcctatacaccaataatagtcaaacagagagtaaaatcatgagtgaattcccattcacaattgctacaaagagaataaaatacctaggaatacaacttacaagggatgtgaaccaatgctcaaggaagtaagagaggacacaaacaaatggaaaaacattccatgttcacggataggaagaatcaatatcgtgaaaatggccatactgcctgaagtaatttatagattcaatgctatccccatcaaactaccactgactttcttcacagaataagaaaaaaactacttaacatttcatatggaaccaaaaaagagcccatatagccaagataatcgtaagcaaaagaacaaagctggaggcatcacattacctgacttcaaactatactacaaggctacattaaccaaaacagcaggtactggtaccaaaacagatctacagaccaatggaacagaacagaggcctcagaaataacgccacacatctacaattatctgatctttgacaaacctgacaaaaacaagcaataggaaaaggattccctatttaacaaagggtgttcagaaaactggctagccatatacagaaaactgaaactggaccccttccttacaccttaaacaaaaattaacacaagatggattaaagacttaaacatgggctgggtgtggtggctcacacttgtcttaatcacagcactttgggcggctgaggtgagcggatcacgaggtcaggagattgagaccatcctggccaacatggtgaaaccccatctctaataaaaatacaaaaaattagctgggcatggtggtgcacgcctgtagtcccagctacttgagaggctgaggcaggagaatatcttgaacctgggaggcagaggttgcagtgagccgagatcatgccactgcactctagcctgggcgacagagcgagactccatctcaaaaaaaacacttgaatgtaagacctaaaaccataaaaaccctagaagaaaacctaggcaataccattcaggacataggcatgagcaagggacttcatgtctaaaacaccaaaagcaatggcaacaaaagacaaaattgacaaacgggatctaattaaactaaagagcttctgcacagcaaaagaaactaccatcagagtgaacaggcaacctacagaatgggagaaaatttttgcaacctactcatctgacaaagggctaatatccagaatctacaatgaactcaaacaaatttacaagaaaaaaaaaaaaccccatcaaaaagtgggcgaaggatatgaacagacacttctcaaaagaagacatttatgcagccaaaaaacacatgaaaaaatgctcatcatcactggccatcagagaaatgcaaatcaaaaccacaacgagataccatctcacaccagttagaatggctatcattaaaaaatcaggaaacaacaggtgctggagaggatgtggagaaataggaacacttttacactgttggtgggactgtaaactagttcaaccatgtggaagtcggtgtggcgattcctcagggatctagaactagaaattccatttgacccagcaatcccattactgggtatatacccaaaagattataaatcatgctgctataaaaacacatgcacacgtatgtttacagcggcactattcacaatagcaaagacttggaaccaacccaaatgtccaacaatgatagactggattaagaaaatgtggcacatatacaccatggaatactatgcagtcataaaaaatgatgagttcatgtcctttgtagggacatggatgaagctggaaaccatcattctcagcaaactatcgcaaggacaaaaaaccacacaccgcatgttctcactcctaggtgggaactgaacaatgagaacacatggacacaggaaggggaacatcatacactggggactgttgtggggtggggggagggggaagggatagcattaggggagatacctaatgctaaatgacgagttaatgggtgcagcacactaacatggcacatgtatgcaacaaacctgcacgttgtgcacatgtaccctaaaacttgaagcataataataattaaaaaaaaaagaaaaaaagatagggaagggtctgaaggcagccttgaagatgctaagctggttagtctctcccacatcctactaaacagctgccaggaaaaaatggcaattggagtaaagcaccaatatcagctccatggcccccaaaacacagtggtgtccaggtaaaaactgacccagggaggaacagggtgccaccttacatagcacctttcaccaacaggacattccatgcctccaacacattcactgaaggacagctacagttatcacaatcagcatcttcaagcaggtgacaaagacaaagatgagcaaaacaaaaatgaaaattaccaaatatttgagtaaaagcaacagcatcaaaaaatggcaccaagtccaaccaactaaataactaacatctgagaaaacagaattcatagaagaattgagggaggaaggtctttacagtaaaccatacatatagttgttatggactgcattattatggccccctgaatttatatattgaagctgtaacccctagtacctcaaaaatgtgattgtattttgaaatggggcctttaaagaggttaagtaaggtaaaatgaggctgttagtgtgggctgtaacacaatctgaatgaagattagggcacacaaagagacaccagacaagtgcacacccagagggaagatcaagtgaagaggcagcaagagatggcatctgaagacaagaagagaggcctcagaggaaattaactgtgctggcaccttgatcttgggcttccagccttctgaactgtgagaaaataaatttctgttatttcagccacccagcctgtgatactttgttcctagcaaactaatacaatagtgatattctcagaaagaagtcatgagaatattaactaccaggaaaaacaaactaaatagtttggaaatttagaatgtcagtgttaaaattaatttgtgtcaagatctatatcccagggaaataaaaaataataattttttaaaagttatccagctgggcacagtggctcatgcctgtaatcccagaactttgaaaggctgaagttggaagatcatttgaagccagaaattcaagagcagcctgggccacaaagcaagacactgtctctacaaaaaataaaaatgaaaatgaaaaattacccaggcatggtggcatacgcttgtagtcccagctgcttgggaggctgagacagtaggatcgcttgagcccaggagttggagcccgcactgaaatataagcacaccactgcactacagcctaagagtcagagtgagccctgtctcttaaaaaaattaaaatttacctaagagaagagatacagctgaagaatgaattagtgagctgggagatcaagctaagcaattctcctaaaatgctgcgcaaagaaaagtgaagaaagcacgaaggaagagctagaaggcatgaacggtgcatccaggagcttcagcagctgcctggtaagtgctccagactgaaagcagagaaaatagaagacatgagatgataacttagaagtcactgaagaaatttcctcagagctgaagaaacacatgaatcttttcattcaaatggaccattatatgtcatgcagagtgaataaaagaagcacagtaaaacacatccacgtgaaacttcaaaatccagtgaaaaagaaaatgctaaacacttccagttgggcagggggtggggtggcaattataaactgatgaatgaaaattagattactgtctgtaatcacaacagcaacactgggtgctaagaaatgttggaatattatattcaaaattctcaagaaaaattcacattgaacctagaatcccatttccagcccaatttcaaacacaaaataaagacattttcagatatgcaaggactcagaaagcttatttgtttaccctttctgaaatagtttctcaaggatgtattccaaaaaaattaaagataatgtataatgaagaggaagatatagaatacaataaattgtagaaaacaaagaaaaaagtagctatttcaaaagttattgatgtattatttttatttaattaccttttataaacaaaattacaagtgatctctccatgataggtgtagggttgggcaaagaggacaaaaatgggaacactcttctcttatttggggatcctgtttactaactctagatttcaactgaaaaacataagcttaagtattcatttttgagaaatatatacactttgaaagtcactaagaaaggaagatgaaggatttccttgagagtagtaattataccatgtaactgctaataaatgtctgatggagtgaagaaaatttgtctataaaagtagcagggaacactgacccttctcaattgtgccttctatcccttggccattagtgttgggagacagtgcagtaatcaaaaacacagatggggctcaggtcccagcttcccattcactagctgtatgtccttactcatgacagttactatctcggagctctggtgtgtccattgttaaaatggaattaataaaatcttgtaaaattgccatgtagataaataagtcaaccctcccttggtgaccaaccatctgcacatacagatagtgtgatggttaatactgagtgtcaacttaacaggattgaagcatgcaaagtattgttcctaggtgtgtctgtgagggtgttgccaaaggagattaacatttgagtcagtagacttgggaaagggagatccaccctcaatctgggtgagcacaatctaatcagcagccatgtgaccagaataaaaagcaggcagaagaacgtgaaaggactagactggctgagtcttctggtctccatctttctcccgtgctggatgcttcttaccctcaaacatggaactccaagtttttccgctttgggactcttggacctttgaccacagactgaaggctgcactgttggcttccctacttttgaggttttgggacttggactagcttccttgctcctcagcttgcagatggcctattgtgggacctcaccttatgattgtgtaagttaacactcattaataaactcatatatatatgtatatatgtataacctattagttctgtccctctagagaaccctgactaatacagacaggaatatagagcaatgtctagacagagcctgagaccctcctcacctccaaagcaccttgtgtttttctctccttccccttctttgcccaccctctccttaggaattttcagcaaatccatatcttagaaagctgcagggaggagttggcctgatgggcttgccacacttgggccccactgcagtttccctggagcctcacagggactgcatcacagtccgtggggctcaataataagctctttcagcatcagcctagcttcaccattaattgctaccacattgaggcaaagaactgtggttttcatggcctccccaaatcatgtcggatcattcctacaaaaaagtggaccagaaagaaagaaactaggatttatttcttagtgccagaagtaacataattacagaggaatgttctggctaatgtaaaagttgctctttggtatgttgacctaagacctatatttgctgttttgttttcaatgttcttcctcacatgtcctgtctttaccatttccaagcctaagaactgtgggttatctataatcagtcattaatgttttcgttaccctcagttagtgaatactcaaagaagctggaaattctcaaagctctggtagttgctcaaggaaaagccaacaaataatagggtatagaaaagcctcaagtaaaactagatgggtattgttggatacccatgacgtaaggatacataaagtctttcattttgctgagtcaaaatgtgccatctaaactacacagcaaccatgcagtttattagctcaaaaaaaaaaaaaaaggccctggtcatttaaatctatgccattcatgtgtttatacatatttttatatgctttatataggaagtcttttaacttttttttatttaagcataggtaaaagttatataaccaaaaaattcgattaactcaaatacatgagaatatttgggcaatcttttggcttactgatttttctagttagtggaggatttaccaaagagttctttcagctttccacctttatttttcttttcctttttttttttttttttttcagacagagtcttaatctgtcgccaggctggagtgtgcagtggcgcgatctcggctcactgcaacctctgcctcccaggttcaagcgattctcctgcctcagcctcccaagtagctaggactacaggcgcgggtgccaccatgcctggctaattttttgtatttttagtagagacggaatttcaccatgttggccaggatggtctcgatcttttgaccccatgatccacccacctcggcctcccaaagtgctgggattacaggcatgagccactgcgcctggctccacctttattttctaacgatttctttaccaagtcttcccaggtcctttacttagtacttttatctcacctaaggtacatgactttttaaccaatgagttcttattgtaaaaatgcctcagaaatatcattctggctgtcaatttattaagtgatatgaattcatgggttaacaatttatgtctttttcatagaaagctaaatgtacaagaaaatctccagatttcatcatgatatacaaatgctttaaagtgaaggagttcagggaacttgaccccaaaatatggctccctagtataatgagtattttgaactaaaggcctttagagatcaacagattttagaagatactttttccctatctacataaagaccagagagacccataaagagaggaattgttttcctcccctacctcttgcctctcaatcctctgcctctcccaaacacaagctgaagttccctcatctgcctaaagtctggacctaccaaagaagaaaacaatgacctctggtcccttccctgagttttcattaactgaacccatattgcaagaaggaagactaaagtctgtcaacagacctcgacagacttttgtcacaaaaccttgactgctctgtgggcccaagagaccactgtatgttcttcaagcccactgatttcccctaaaaatcatttattatccccctaaaattatccacacttccccatctccattccccctaagaaatagagtatataaacacctgtatcccattggaatattggacaatcactctgagattccctacatgcacataatagtaataaatctgtgtgccttttcttttattaatctaaatttttgtgagttgatttttcagcaaaccttccaagctttcccttcacccatacaaaaagtgtgtaacttttgggttactatatttctggctcttattttttgaatgtcttccatagggggttttctttgtcttataaaaatgtggggaagctgaaatgcagggaatctgaagcaatcatatgtttttgttttacctcctatgtgaaatacacaagtaaagtggtttctcgacacgtacatcaagggctgaattccaaaggtatcccagttgtctgagcattctcccctacctatcagtgtattcctttcctcttcttacttttccataaaccaaatgttttcatttcttatatttatacttctgtgactcttaataaagatagtaaagcataaacaataaatgcctgaaatgcagtttttgtctgactttggacttactctgttgttcagttttttttgaagatttttcctgccaaccttccactccacccaccatcacccgaccccggccccctccatttggttcactgacaccttccaaaacctattccattgtctagcactaattacactgcaccacagagggagaggctgtgggctccagaatcggcaacctcaatctgaatctccgctgccccactgcgggattcttaacctctctgagcctctattcctttatctgtaaaagtggagataatagcaaaactgggtaatttgctggaaatatttaaatgagttgacctatgtgaaagaaactgactttcaatagatacttagtaaattctagtttctcttccctagtttgaggaatttggaaggaggaataacaatgactgtgtctataaactcataccacttttccaccgcacccctttatcttaacaatctaaatgaaagttcaatggcagagtaccaaagaaaagaagctaaaatgtttatctgaaaaaatcagtagacttctgccaaatttccagtctcacaaaacccaagaatactcttcccaagaatttccagtgcccctcccccaatcgctaataataaaaacaacaattctgacatctgtttgctgctagaatatactggtggctcaatcttcaaagaaaaatgtaatataatcaaatatattcaaattaaagtataatttagaaggtttttttacacatcagaaggtatttcaagaccttgccctttctccatttgttagtggcaacacttactagttctggttattttcactgtccaccgctttggatctggatactggaagtttacctcagtaatacctcctggaggaccaaaaagtgagataaacacaaatatcagtataattgaatgaggcaatatggacaaacaactgcaaagaagagagatactctatcatgtagaatattacattctctgcttcccttttatggacattttattctgctacagaattccaatcactagtttagccacactctgaaaagtcattttcctttttgacttgtagtggagccaatcagtttagaagcactcagggaggtatcttatataccatctgggacaaagaaaataaagtattttttcatttccttagcagttacaaatttacctaatgatatcattccaaattgagcagaatataaggtttgactattttaatcatttggcaattgtggtccaagtcctattacaatattaagatacccacaatttaaatcacacatcatatgaaatagtaatttgctttaaaaatgctgaatttcttggctcatgttctaaaaagatataggagaccaattgcaacaaaaaaaattatagaacatgtgtggaataaaatatgtaaggaatttccctagtttatttccttaaatgagccacaccataaaagtggctacaatgcatatatatatatatatatacacatatatatatccctgagccctcgtaattgttagattgctagactagctttgctatgaaaaagctgaggaactccagctggagccattcctttccccagttattactgaaggttatatttaattatctagctgagctgctgtaattagcatcaacaaagctctgtgccataatgacttgatatataaacttttgggaagcccattacaattcagatggaccttctgaaatgtagcattccacctgatggctaatcccagatattaacgtccattactccattcgatttccattcaccccttctaatgtgtttgtgtactgcttgctgacaactgtagtatgtttgtagtacaaacagtactttgcatttttgaatttggggtttaaatctgttcaggctctctcatgtggctggaatgttggcatggctcagaaaacaaaagtcaacttaaaaaaaagttggttcctccaggaagagagatggctatcaagcttgacaaatgcactgtaatgtgaacagggcagcagggttaattctgttaagtgattgctataggcctttgcttgtcttggacttttggccttttgctgcaaacagggtgggccttgttaaactgccaagttgacaattttatatccaaaggcttttgacagttttatatccaaggctttgcttttctgttgtgatttttcaacaggaaagctcaaagtgctctggggattttcatctctgagtccatgataacacttagaaaactcaatagatcgttgtttgttgaatctgagcataaaaattaggttctaagagaaagaaaaatcattttataaaaacatagatttggatatcacagtgtgctctgctaatttcttttggctggtgctttttgttgttgttgtttaaagtttacatggaatctctgtttccactgaaccatctcagacactgaaacacaaagctgggttacaacctaatccgcaatgtggggttatcttcctactgttggggcattttccaactgggtaaggatctgagcactatagagatgtatactgagctcttatattaccttgtctgtatcagacttaactgagacacagataagttaaaaagtagcccgcaaatcctaggacctagcaccctacaatctaagagctaaaatcattgtctcttggacataaatcagcaaacttcattcagcacatgttaagtacctgccatatgttaaccctctactaaccatgtgttacatactgtgaaaaaaaaaagaagtcacagttgaaggtttctagaaggtttctaaaagttacctgatctgccaatcatctccatcagaaccctcaggtaagcttgtgtattaagcagattcctgaatcccaccccagatctacttgattggaggagggggctaaatttgcatttttttataagcttctcccaaatgatgcttatgagtaatgtttgagaactattctagactcaggattctcaaacctggctgcacatttgaatcacctagtgaatttaagaccaccaatgacctagtaccacagcagaccaattaaatcagaccctctggggtaagggggagcctgagcatcagtcattgttgttgttgttgctgctgttgttgttgtcgttgttaagtccacatgtaactctaatgggcatccaaggctgtgaaccatggttctagactttaggttctatcagaatttacgacaggaagaaatcactcctatctgaagtggtcagatactacctttgatttcctctcatatcttgcaaaagacttcatgttctctttgaaaagtgtgtgtgtatgagtttgttattgttttaaaaattacatatttatatagcacccatgcaagaaacagtttttacagatagcacataatttcatttgtcttcaattcatctactgtaatgtaattagaagaaaaacgtattagtattccaattatagataaagcaaaagattagtactccgcctgagatcacacaacaaattcattctaaaattctgacttcactggagttgcttcccagaaataaaaaaagagagagagagatagagagtctttgaacagtcctagttgaaatgtagcctattcaatactaaaaattattcaaataagtagtccatccacactccataatggacagtcttcctcttggcttttttgttgttgttattataaagaagggaatatcctaaagggtcaataatcctccttctatttctccatttttctgtctccataaggcaacatcactgaatgtattaatgggcttgctcagttagggtttttaatccctcccagtttgcccagaatgttctcagttttagtactgaaagtcctgtgcccagttaacccgtcttgggcaaacctggacagtccctatcagcagtggaaataaacactgctttgaagatctatgcaggaatgggagtttaaggttagttaggaagatcagccaggccagcaatgggcagggagtgggacaatctaaagatccatgaaggtgggcagacttggcttcaggctttgaagtctagctgggaaggcacagtgcatgacccagggaaggggctctcaaacttgagtgtgtattacaaccccctggagggcttgttagaacacaaattgctgggcaccacctccagagttcctgattcagtaggtctggagaggggcctagaatttgcatttctaacacattcccatgtaatgctgatgctgttggtcccaggatcacgccttgagaaccactgctctaggtgctagtctagactttcagctgagcataagtaataggtgtgaaggtgatgtcttggcactagggagctagcaggccacattaggcagagatatgagctagggaccaaaggcaggactcaaagcactgagcaaatgtgagctaacatggcaggaccaggctaagaggatctggagtactaggcagataaacaaaacaggagctccatcttaaagaagtatgaccaagatctttctactggatgtgggtgcaaggtgtggtgttggccttaggaacaaggcaaaattcaatgcgtaagcaatcattgaggagcacagacttaatggtcagtcactggagttcctgaattaggaattttaaagatcccctgacaaccataaaagttgggtgaccaactattctagttttcccaggaatttccctacttcagcactgaaagtgcagggcctagaaacccctcagtcctaagacatctggtcaccctaattgtgctcttagaagactacagcctagatccacctacatctctgggtcagttggctccagccataaggaaagaaagcacacatgagaagaggaggagccagctggaaaacgaggcagagagccaggatgctcattgcaacctatagccttcaagagaggataaaagggcacccagaaatattgtctataaatgctgaaatgcatttgctttaaatgggcaaaacacgttaaatgactcctcaggcctgcagcttttctaaactcatgaaagtggaaaagttcagcacaaacagaaccatccagacaccccgtagatggaagtctctctcactgccttttgacagtcatcacacacacttaagatctcattgtaagtatagccttaaagagccctgataagtacacatcagtaggggaactaaaacccatctgtaaatattagcagagtctcccatgttcttttggtttccttcacacacaaaaataagctaagtggaatgaacacacagttcaaaatgactaaaacactaaaggacatttaaatctggggaaagaatctctctgttgggaatatggatttcacctaagatccttagtgtcattcccagcatgccagagttatttcaaatctctttcataaccaaatattaatattccaccagaatggggagcatgagggccactattgacaggaacacagcctactaatcatgagagatgtttaagatgttcttcactaacgttatccacagactgtataaaaataataacagaaaacgtttaacagtaacaaggatcatcaccagggaaagtacctaaaccatcacaaaatccgaaagcaaacactgaactaatccatcctcccagcaactaactcctgcaaaatgctgcttatgtagaaataatcttctcaatcacacttaaaatattcactatgataatgaactttagccgcagtgaattgagtgtcccaatgtgctgagtcttcatgatcaaggagaacctggcataaccagcatcttcaaaatgcaagtaccctatgtccttctggaatgagccatgtcatccagtaagtaggctgaaacagagggatccgacgaggagactctcccagagctgaagtgggagttcagagcagagtggagaagattgaaaatctcccagataacctgggagaaaatgccagaagaaacaggaatttgcccatccattcaatctttcattcaacagatagttatgatgtgccatctcaatgccagaccccatgctaggcagaaaggctacaaagtctaatggaactgctttataggtatttgtaatcaaatagaacaagcagacaaattaacaagtaattgcagtacctctaagacgttttataataaaaggatatatgcaacctcagagaagcacagatgagagagaattttccccagccttgtattattctcagtgcaactaactgtctttgataccacagttaagtccttccttctcagaagcttcttctttgagtcacttttgggaaaaaaataattattgcttttctgagagatcagagtctcatcaaatgttattgtgattctaagactgtcaacagctaccatttagtgatacctactatgtgccaggcactacactgagtgttttgcacacattactccactcaatcctcagccctgcgtaacaagcagcatgctctctccactttagaaatcaaggggaaatgaatcacagtgggattaactagtttaccctcagtctgtcaatgatggggcaagaagtgaacacagacagtccacttcatgttcaagatcttaaccactatgttgaaatcacttatgtagtgaactattagaatgtctatattgattatttgtattctactgttataattgcatgcatctagtttttgctttgatgagttcttacaagaaattgcatgctgcttttaatacttccttatttgagttgataatttgcaaccattttatttgaacctatctctgtgggacttaaccacaacagctgcaatttattgaaaacttgctctgagccagtatatatcatctctgtcaattcccatagttctctgaggggtatgtatgtaggtatgtgcatatacttatattcttatatatgtatatgtaatgtagagtatcaggtaacttaccccttgtagcttaggctacaagtcctccactagcataggcttttctaaggttccagaaagggttcttagaaacatgtttgcatgttcatacattttcttatctatttttgaaagagtatttcgaaactgatataagcgtaagacccacaaagcctgcagactacaggtgatggaaacaggatttgtgtgcagatgtgcccaactccaagggtttaaaaccccgtgacacagtaagtaaggaggaaggggtggagcagtgggatttagatgcacatgttgggcttatcatgagagatttcaagctaaggaaagaggggagttgatttgaggggcttttctcctctaaagtgaccttgaagccctcattttaatgcttcatgtgccaacaagaagtagagaatgtaggtaactctaatacgaatgaggctctaagaactactaggtgaacactcataatagtggcaccagttccgaacaacacatttgtaaataaattgaagcagccttcagttttttctaaactaagaagctactagacactaagcaggtcaaacagaccaaaggcactttggtgacacttagcttaggtagcccttcgactgccaatccatcattatctgaaagttctgcattgaccaactgctgtcagaaaatgttccctttcttccagaaattccatgccagctcaccttccaaaagtttccagtgggcttgttgatctttcacccaaatagccacctaacactttacgaatatccatctctgtgaagaaaccgactcagctgcaacaacctgttttttttaattcattaagccttagaatagcatctttcttagtaaaatataaatgcaatatttaataaaactatatatacagtgattattataagcagggagaggacaggctgaaaatgagtgattttaacaagagctttaacaatttttaatagacctgcattcctttacattcctggtgtttctcaaactttagtgggtttaaagttcatctggggatttataaaaattgctgacttcaagagctcctcttaaaatttctaattctgaaggcctggagggatcctcaacaatcttcatttttaacgattttgatgaagatggactgcagctgtctcttgagaaatgcttctttagaacaagtgaaattgctaattacacagtaagcacttagtcatctaccattacccaagtcttgttagttgtgagttgccccttggtatctgctaaggtttgaatgtgtccctcagaaagcatatgttggaaacttaacctttaatgcaacagtgtttgttgggaggtaggttccaatgagaggtaattagaacatgagggctctgcatttatgaatagatgaatgtgtggaagtaggttccttataaaataaggtcagtcacctttcctctctcccatcctctttttgccctctgacatcctatgcctttcaccatgagatgacacagcaagaaggtccctgatagataccagtgcttcaatcttggacttcccaactaaagaactatgaaccaataaatttctgttcattacaaattatccagtctcaggtattctgttacagctgcacaaaacagactaaggcagtatcccattctcagctgcagcaattctttttaagacaaaactccatggattttaagacatctgagtagggagagttaattatgtcctctcaaagaggtattttccctagaccaattagtttacaagaacatacactctgtttctaaaactttggaaaacaaagatgtggttcatatcagagtgaaaatttcattgatacccattataatgaacgtgtttcattttggcaaactgtcatgaaatgtcctgttcatttggagaaaattcctggaaagatggtaggcagaggtcccaactcccaatacggaatcctaagagggagaagatctgtctgctcccagtcagagaagggtgggctcttcctacactaagatcttagccacattttgtctccctgaattcttgccagagactagtcctccaggctgagagtatatcttatatctgtataattagataacaattatgttatctaaaactgagaaccctgggtatggtacatccagacacttacggcagaaaatatttgatatggtttggctctgtgtccccactcaaatctcatgtcaaactgtaattcccaatgttgggggagggatctggtgggaggtaattggatcatgggggcagatttctcccttgctcttgcgatagtaagttctcacgagatctgataaatgtttaaaggtgtgtggcacttcccccccttcactctctctctctttctaccatggtgagacgtgcttgcttccccttcaccttctgccatgacggtaagtttcctgagaccttccagccatgcttcctgtacagcctatggaactgtgagtcaattaaacctctttcttcataaattatccaggtcaggtagttctttatagcagtgtgagaacagactctacaatatcttcaaaatgttgtttattttttaaaaaaatgtatggatggaggccaggcgcgtggctcacgcctgtaatcccagcactttgggagaccaaggtgggcagatcatgaggtcaagagatcaagaccattctggctaacatggtgaaacactgtctctactaaaaatacaaaaaattagccgggcatggtggcaggcgcatgcaatcccagctacttgggaggctgaggcaggagaatcgcttgaacccaggaggaggaagttgcagtgagccaagttcgtgccactgcactccagcctgggtgacagagcaagactccatctttaaaaaaaaaaaaaaaaaagaatggtatcagaaagaatagaaggtgaaaggaagaaaggaaatggaaaattagtattctatccatctgtagaaaattttttaaaatatgtattgtcttttattctgatttcttctggattccactttgtagatttatgagcccaggaccactggtattcagtaaaggagtagaaatcaatttgtaggggcaggagggatgccatgtgtcatagctacgcaaacagaagaaacttagtgattaaaactcacaaaaaagaacagtattagctgggagctatggctcatgcttataatcccagcactttgggaggccgaggtgggtggatcacttgaggtcagcagttcaagaccagcctggccaagatggcgaaacccccgtctctactaaaaatacaaaaattagctgggcgtggtagcgggcgcctgtaatcccagctactcaggaggctgaggcaggagaatcacttgaacctgggaggcagagttgcagggagccaagaacatgccactgtactccagcctgggtgacagagcgagactctatctcaaaaagaaagaaaagaacgaaagaaagaaagaaagaaagaaagaaagaaagaaagaaagaaagaaagaaagaaagaaagaaggaaagaaggaaagaaggaaagaaggaaagaaggaaagaaggaaagaaagaaagaaggaaagaaggaaagaaggaaagaaggaaagaaggaaagaaggaaagaaggaaggaaagaaagaaagaaagaaagaaagaaagaaagaaagaaagaaagaaagaaggaaggaaggaaggaaggaaggaaggaaggaaggaaggaaggaaggaaggaaagaaagaaagaaagaaagaaagaaagaaagaaagaaacagtatcacctttcaaacagtgatgggtccctaatacctatatgctgagtattgtcacactcatgttccatagctgtttgtattctgtgtcatttttactatacgtacacaagacagaaaacaaaaaacactgtttaattcagattttgtaaggtatatagtataactgtttactaaaatatcatatttgtaggaggtgaaagttaatatactagcaaactgctaaagagaattaactatttttttaacaaggaatgtatatttatgtagcactctcagactttaaaagcaccattactgtacataaagcttttgatttgcagtttttcatcataaacccaacagagcagagcccagacaccaggcatttttccctggagtcactctgccttattatcaggactggacttaagtatccttccctggaaagggcaaaagatctcacattgtagggcaaatatgcttgaggcagtacaaagaggcacagtcatgtttcaggatgtggttttagccaaaggtgatacaatcacaaagctgggttgagagaggaaataacaatcaggagcagtcttgagtgtgtctctgttacctggagtcttcttgttcttctctctacctctccaagagtctccattaccattgatgtaaataattagtaataagagccggaagcaaaaatgttgaaatactttaactcttttgaacacaaatttaatagcagtagtaaactaacaaatgaatcattgaattgagggtggattctgctgcaacaaagaacttgtattatgatataaattgagaagattgttctgatctagctcctcctgtattcagagttaaaactctctctaaacatcatgttccacctaagaaccattaactctcccattctcacaacctgtgtgacaaatactcatactctaaatatttggcttatctcacttatccattgctagaggatttaacatacaagtgttgccctacatacagactactaagttaaccataaccattcgtgtattgatacgtatgttcaaacagcaatgatgaactgagtgcctgctctgaaggaactcaaattcagattcagctaatatttctggagtaacacccatgcactaggtattgagctaaagactttgtcttatttaggtgcctatcatgtgctaggtgttgaactagttactttaacacattatctcatttggtcttcataacaacctagtaggtcggcattttttattttatagataggagactaacactcagaaaaggtgagtgacttgcctgaagtcataaaattagtcaagacttaaaactggctttttggtcctgagtcttctctctggctctttctaattggtagtattgtctgtcttaggtccacgcttttactatcctcttctatgcaaaagaatatctgatcagaaagaaacaaagccacttatagtttgattagaaagaaataaaaccgcacagaattttagccacctttgtctatgggctgatagctttgtgcacacaaggccaagcaaccacaggctccagagatgtgatgtggagatgtgccaagtggcaggtgacatcacatctttacattcctagaagtactgtgccctaataattttacagcagagacataaacagatggatgtgacaaatccagtaatggcagttacataatctcaagatctttctcaatgactctaagaacatgtccaagaccaagaatgacttaccaggtacatgccagtgctttaactaaacagaaactatttttcaactaaacaaacataaattacattatccctcctttttggctctaccattttgaaatttctaactttgtgaggtttttaacttaaaaatgtttttccaaatttatggaaagaggccacatatgcccacgtttagggaaaagtatggacttcagagttacaagctcaggtttggacaaggccaggcaaggttggactgaatcctgcctctatcgttttctcactacatttgcagtgagtcactaaatttttttaagtctctgcttcctcatctgtaaaatgggtatagcaacgatatctacctgtgcagaaaagagttaactcagcagggctgaattgttcaaaccttgcacattcccaagaaaggcctgttttcatgactgctctttgaccagcttctgggaattaaactgttagaatgttccaagaactaagagtatttttctcacatgggttcttgagccatactataccagtttgtctgcatacgtgtgcaacgtggtttatgcttgcttctgggagcctggagcttcaatggcacaagtcatgtgcctatgtgaatgatccccaacaaaaaccctagactcgctcaatcatggcagatgggaggtaggactagattgcaactccagacagagcagtgtgcaaggtcttgcattgtgaattttagctccagatcaactgcaagaacaaaccagcaatcctgagaggacccacagaccctctgaaggaagcagacagctcctacaggacctgggagaccccccaaaactgtgagtgccccaaccttggaagcagaaaatggagaccctcctttcctgaactcacactcccactggagaagctgaaggtctgtttgcaggagaattttcttactttacctgaagctgagtcaatctagagagctgagtgaaattcaggggcagaggaagtggcagaaaggctctgggaactcactggctcccctagcaggccattcctgcctgtcaccacagggatccaacaggagaggagcaggggataaaactacacaaggagaaggaaatctctagctgaactatgtaacaattagaacgggggttgaagcctcctggccagaactcaggggagggcacaaatccggcatgcagactccaaaggcaagggaagacccaagcccctttcttttgtagcgtggaggtgggtagactgaggcaggttttcaaacccatattgctctccacctggaaatgaatggggatctggtggtgggggcatggtgggagtgagatgggcccttcagttcgcacgggagctgggtgaggcctgtaactgctggctttcccctacttcctagacaacctgcatgactcagcagaggcagccataatcctcctaggtacacaactccagtggcctgggaatctcacccccatcccccacagtagctgcagcaagacccacccaaggagagcctgaattcagacaggcctagcccagctcccacctgatggtccttccctatccaccctggtcacggaagacaaagggcatataatcttgagagttctagggccccacccaccaccagttcctccccatactactacagctaatgctgtctggaaaatgccacctcctggcagaaggtcaaccagcacaaaaacagcattgaaccaccaaagcaaaggaccctcatggagtccattgcaccccacgccccctccaccagaacaggcactggtatccatggctgagagacacatagatggttcacgtaacaggacactgtgcagaaaacccccagtaccagcccagaactgcgtagactcactgggtggctagacccagaagacagacaaaaatcactgcagttcatctcacaggaagtcacatccataggaaaagggggagagtactacatcaagggaacaacccgtgggagaacctgaacaatagccttcagtcctagaccttccctttgacagagcctacccaaatgagaaggaaccagaaaaccaacccaggtaatactacaaaacaaggctcttcaacacccccaaaaaaccacattagttcaccagcaatggatccaaaccaagaagaaatccctgatttacctgaaaaagaattcaggaggttagttattaagctaataagggagggaccagagaaaggcaaagttcaatgcaaggaaatccaaaaaatgatacaggaagtaaagggagaaatattcaaggaaatagacggcttaaagaaaaacaatcaaaaattcaggaaattttggaccacttttagaaatgcaaaatgctgtggaaaatctcagcaatagaattgaacaagtagaagaaagaaattcagagctcaatgacatggtcgtcaaattaacccagtccaacaaagacaaagaaaaaaaaaatgagaaaatatgaacaaagcctccaagaagtctgggattatgctaaacaaccaaacgtaataatcagtgttcttgagaaaaaagacaattctaaaagcttgggaaacatattttggggaataattgaggaaaacttcctcagccttgctagagacatagacatgtaaatacaagaagcacaaagaacacctgggaaattcatcgcaaaaagatcttcacctaggcacattgtcatcagcttatccaaagttaagacgaaggaaagaatcttaagagctgtgagacagaagcactaggtaacctagcaagcaaaacctatcagattaacagcagatttctcaacagaaaccctacaagctagaagggattggggccctatcttcagcctcctcaaacaaaacaattattagccaagaattctgtatccagaaaaactaagcatcatatatgaaggaaagatagtcttttttagacaaacaaatgctaagagaattcgccattaccaagccaccactacaagaactgctaaaaggagctctaaatcttgaaaaaaaatcctggaggaaacacatcaaaacagaacctttttaaagcataaatcacacaggacctataaaacaaaaatacaagctaaaaagcaaaaacaaaaaacaaaaacaaagtatacaggcaacaaagagcacaatgaatgcaatggtacctcacatttcaatactaacattgaatgtaaatgatgtaaatgctccacttaaaagatactgaaccacagaatggataagaactcaccaaccaaccatctgctgccttcaggggactcagctaacacataaggactcacataaacttaaagtaaagcggttaaaaaaaaaaaggcatttcatgcaaatggaaaccaaaagtaagcaggtgtaaatattcttacatcagacaaaacaaactttaaagtaacagcagttaaaagagacaaagagaaacattatataatggtaaaaggccttgtccaacaggaaaatatcacaatcctaaaccctaaataccacaatcataaatctgaaaatatatgcacctaacactggagctctgaaatttataaaacaattactaatagacctaagaaatgagatagacagcaacacaataatagtgggggacgtcagcattccactgacagcactagacagctcattaagacagaaagtcaacaaagaaacaatggatttaaactatactttggaacaaatggacttaacagatatatacggaacagttcatccaacaactgcagaatacacattctattcaacaacacatagaactttctccaagacagaccatataataggtcataaaatgagccttaataaatttaagaaaattaaaattatatcaagcactctctcagacaacactggaataaaactggaaatcaactccaaaaggaatcttcaaagccagcaaacacatggaaattaaatagcctgctccttaatgagcaatgggtcaaaaatgatattaagatggaaatttaaaaattctttgaactgaatgacaataatgataccacttatcaaaacctctgggatacagcaaaggcagtgctgagtggaaagttcacatccctaaacacgtacatcaaaaagactgaaagagcacaaactgacactctaaggtcacacctaaagaaactagagaaacagaacaaaccaaactcaaacccagcaaagaaaggaaataaccaagatcagagcagaactaaaggaaactgaaacaaaaaaaatacaaaagataaatgaacaaaaagctggctctttgaaaagataaataaaattgatagactattagcaagattaaccaagaaaagaagaaagaaaatccaaataacctcactaagaaataaaacaggagatattacaactgacatcactgaaatataaaagatagttcaaggccactatgaacacctttacacacataaactagaaaacccagaatagatgcatacatttctggaaaaacaaaaccctcctagcttaaattaggaagaattagataccctgaacaaaacaataacaagcagcgagattgaaatggcaattttaaaactgccaacaaaaaaatagcccaggacctgacagattcacagcagaattctaccagacatttaaagaaaaattggtaccaatccttttgacactatttcacaagataaagaaagaaggaaccatccctaatttgttctataaaggcagcattaccctaatgccaaaaccaggaaaggacataaccaaaaaagaaaactacaggacgggtgcggtggctcacacctgtaatcccagcactttgggaggccaaggtaggtggatcacgaggtcaggagattgagaccatcctggctaacaaggtgaaaccccgtctctactaaaaatacaaaaaattagccgggcatggtggcaggcgcctatagtcccagctactctggaggctgaggcaggagaatggcatgaacccaggaggtggagcttgcagtgagctgaaatagcgccactgcactccagcctgggcgacagagtgagactctgtctcaaaataaaaaaaaaaaggaagaaagaaaactacatacagaccaacatccttgatgaacacagatgctaaaatccttaacaaaatacgaactaactgaatccaacaatatataaaaaagatctagggccaggcacagtggctcacacctgaaatcccagcactttgggaggccgaggcaggcagatcacctgaagtcggtagttcgagaccagcctgaccaacatggagaaaccgtgtctctactaaaaatacaaaattagctgagcgtgttggcgcatgcctgtaatcccagctactcgggaggctgaggcagaagaatcgcttgaacctgggaggcagaggttgtggtgagccgaaatcatgccattgcactctagcctgggcaacaagagcgaaactctgaaactccgcctcaaaaaaaaaaaaaaaaaaaaaaaaaatatatatatatatatatatatatatatacatatatatacacaatctgccatgataaagtgggtttcataccagggattcagggatggtttaacatatgtgagtcaataaatgtgatacaacagataaacagaattaaaaacgaaaatcacatgatcatttcaatagatgcagaaaaagcattcaacaacatctagcatccctttatagttaaaactctcaacaaaatcagcatacaagggacataccttaatgtaataaaagccatctacaacaaactcacagccaacttaatactgaatggtaaaagttgaaagcattccctctgagaacaggaacaaggcaaggatgcccactctcaccactcctcttcaacatagtactggatgtcctgaccagagccatcagacaagagaaagaaataaagcgcattcaaatcagtaaagaggaagtcaaactgtcactgattgctaacaatatgattgattaccttgaaaaccctaaggactcctccagaaagctcctagaactgataaaagaattcagcaaagtttccagatacaagattaatgtacacaaatcagtggctcttccatacaccaagagcaaccaagcagacaatcaaatcaagaacacaaccccttttacaatagctgcaaaaataaaatacttaggaatatactaacaaaggagtcaaaagacctctacaaggaaaactataaaacactgctgaaagaaatcatagacaacatcaacaaatggaaacatatcccatgctcatggataggcagaatcaatattgtgaaaatgaccatactgccaagagcaatctacaaattcaatgcaatccccatcaaaataccaccaccattcttcacagaattagaaaaacaattccaaaattcatacagaacgaaaaaagagcctgcagagccaaagcaagaccaagcaaaaagaacaaatctggaggcatcacactatctgatttcaaactatactataaggccatagttaccaaaacaacatggtactggcacaaaaataggcacaaagaccaatggaacagaagagagaacccagaaataaacccagatacttacagccaaatgatctttgacaaagtaaacaaaaacataaagtggggaaacgacattctttcaacaaatggtgctgggataattgcctagccacatgtaggagaattaaactggatcctcatctctcaccttatgcaaaatcaacttaagttggattaagtccttaaacctaagacctgaaactataaaaattctagaagataacattggaaaaacccttctagacattggcttaggcaaggatttcataaccaagaacccaaaagcaaatgcaataaaaacaaacataaatagctgggacctaattaaactaaagagcttttgcattgcaaacggaacagtcagcagagtaagcagacaactcacaagtgggagaaaatcttcacaatcgatacatctgacaaaggactaatatccagaatctacaatgaactcaaatcactaagaaaaacaatcttatcaaaaagtgggataaagacatgaatagacaattctcaaaagaagatacacaaatggccaacaaacgtgaaaaatgctcaacattaatgatcagggaaatgcaaatcaaaaccacaacgcaatactacctcactcctgcaagaatggccataatcaaaaaatcaaaaacagtagatactagaatggatgcagtgaacagggaacatttctacactgttggtgggaatgtaaactagtacagctgctatggaaaacagtatggagattccttaaggaactaaaagtagaaataccatttgatccagcaatcccactactgagtatctacccagaggaaaagaagtcattattcaaaaaagacacttgcacaagcatgtttatagcagcacaatttacaattgcaaaatcgtggaactaacccaaatgcccatcaatcaatggatggataaagacactgtgatagatacatatatatattatatatataatatataaataaatattatatattatatataaataaatattatatataaataaatattatatattatatattatatatattatatattatataataaatattatatataatatataatatataatttatataattataatttatatataatatataatatataaatatatattataatatatatattatataatatattatatatattatatattatatatatttatatatataatatattatatataatatatattatatattatatataatatatattatatattatatataatatataatatatattatatataaatatatattatatatataaatattatatattatataaaatattatatataatatataaaatattatatatataatatatatattatatatataaaatatatatattatatataaaatattatatataatatatatgatggaatactacatagccataaaaatgaatgaattaacagcatctgcagtgacctggatgagactggagactgttattctaagtgaagtaactcaggaattgaaaatcaagcatcgtatgttctcactgatatgtgggagctaagctatgaggacacaaaggcataagaattatacgatggactttagggagttgcggggaagagtgggaggggatgagggataaataactacaaatatggtgcagtgtatactgctcaggtgcaccaaaatctcacaaaatcaccactaaagaacttactcatgtaaccaaataccacctgtaccccaataatttatggaaaaataaaaaataaaaacaaaaacccttagactcctaggctaggagagccctgctgaaagacaacatttcacacttgtctcaactaattgctggaggaattaggcacattctgtgcaactccactgggagagactcttggaagcttgaggctgctttcctttggatttagtcacatgtgcctattccctttgctgattttgctgtatatcttttcactacgataaactgtaactgtaactattacaacttttgagttctatgagtccttctagaaagtcactgaacctggggtggtcttagggatagatgcctgacacactatcccaaaggataattgtgaagattaaacagcaacatgcatatcaagcacttgacataatggctagcctaaagtgttccatgggtgttattggcatcattattatatattacattatttattcatataaaattatatcttattatatcacatgtataactacataactcagttttctatacactattaataaaagattgagataattctttcttgtcttatttttccttaaacatttacctctctcaccctttgttgatttagctgtatttctactgaacacatgaactaatatcctaacttctcagactatcaacagatgccatgaaataattggatgcttgttagcaactggcctgatagtatttgattgtgctttctactgttccttcctgatgactcgtagagggtagacccagacgatacctggaaattatttgctcatgtggcagtcactgttgattgcctacccaaagccattactccttctccccacctaacagaagccgagttttgttcagcaacaacgtgcccagtcacagaggataaatcttggctagtctaagctagtgctagtagtcgcatttccttttgccaatgatttatttcaggtgatcatgggacctcgttatgaatgatgagacaaaggtagaatatcccagtaagcaactgggaagatttcctcctctgattgtatacagagaatcaggtagatattagttaggagggtccctttgcctaactttggagatggatatgtaaaaacctgctgctaagtgtgcagttgttatcccaagtctacaatgggagatagcatcaaattactggagatggaagaatgggaagatagacagtttggtcttgataaaattgttgaactgtaactttgtaactacttatatttagacttcctttaaataagaaaagtaaatgttcattttgtctagtcactattggctgagtcttctcttacatgagactaatagtatcctcatgaacttgaaacacatgtggtttcaacacgcgttttgtaaagacaaattatgcacagccctgtattagtccattttcacactgctataaagatagtacctgagactaggcaatttgtaaaggaaaaaggtttacttgactcacagttctgcatggctgaggaggcctgaggaaacttacaatcatggcaaaggcgaaggggaagaaaggcaatcatgagaactcacttgctatcctagaacagcatgggggaaacaacccccatgatccaattacctcccacgaggtccctcccttgacatgtggtgattacaatttggattacaatccaaaaccatattaagtccttatccgggaattctgaaaaggtagcacatgtgcaattcaaacttaatgatcttcttccaaaaaagacatactcagtaataacaaacttcaatcagaacccaattatttttgcaaagaaaggtaggaagatagaaccagaaaattctttagtcttttaaagcatgtcatggtctcctttcagcttaaagaccttcttgattaaacatgaaattttctgtgcagataagccagttctgtggatgtgaagtctgaggagtatattttatgtttataatgtggatattactattcatggttgggaaatgagaaatgaacagtattttacatgccattatcctttgccaatttctctgaagggcatccagcttcacatagtagtaaaatgtgtaattcaggactgggaagccgtataatatgaaattagtgtttttaagaaattttaagggaatctgaattttaaaatgctcaaaaataaaacatatatttatatgcactattagagcacattataagtgtgactgtttttaagtcaaagttttaataatctattgcttatttagggattatataatacctacttccaatatgtgaagcaataagagaaatgacaaaggaattatatatatatacacatttaaacgtaatacatatacacaaatttcaagcatatatatcctccatagtggtcaatttggtaagctttaattgtttgaatttctcattaggaattttattaacagtcaataccatctgattttaaatatcctcaacagtggctgatggtcattctttcaaagcagagaagctatccatctgcttttttctccactcttcatattagcctaattccatacttctctccctgaccatgcaatcctatacagaaatgtgatgtaagtctacatatataagtattattgtttattctacaaaaagggatcctacaatttctatatcttgtctcctcaaacttttgtgtggaataccttgtggaaatcactacaggtcaataggtatagcactaatcattatttttaatgacatttttgccactacaaacacatggccttacatgtgaatatctttctatggaatagagtccaagaactggaattgctgggccaagaagcacacatatatttttaaatttaatagatgttggcaaatggctttcccaaaacctataacacctcatatttttcccagccatgagactaatcccttccctaaatcaccaccagtagtatttattataactcttcaatttttgtcatctgattgatgtaaaattacactttcttttactttaatttgcattttccttattataacaaacttgagaatccttctatatattttttggacatatggattcataattctttgcccattttttaattggattgtgttacttttggccaaatgttcagctatttgaaaaaatcagttacaaatatttgttgaaaattgaatgtctgtctattgttttatttatgatatcctttgtgacatcaaggttcaaatatgtctatcttttatagcttctggaaaagatgctctcagttcatacatttttctacattcaattttctagatcttcttgcaaggcttttacaattttattttgaccatgtaagcttcttagccatctggaatttatatttaaaggtagaataaaatggtgatcctcttttcttttcttccagatggataatcaattgtccaaacatcatttatcaaacaattgattcatttcacactaaaatgaactactactttggaaatatattaaactcatctatactggcttctatttctgcaatttttattcctttcccaaccacatgattatgatgcagtagttttattatttatactaatatccagtaagacaagacctctcactattccccctttgcatattttcttagctattctgaagcatttattcttcagtataaactttaaccttctttggccaatcatacctccaaagaatgccaattctaattttactgccttatgtttatacactcactaggtgtgtgtatttaatgcttctcttcttaagtatttctattcaatgtgatatgcctttccatttgttcaaatcttattttctttcagtaagattttctatttttctttatgcagtttcttttcttgtttgatttattcctaagtattttatatttttccaataattgtaagtagaaatttttttctcacttctatttctaagtattttgttaacacagagataaactaatgctttttaaaaatttatcttctattcatctccttaccaaattctcttttttttctttaaagtttttattttaagttcaaggggtacgtgtgcagatttgttacatgggtaaattgtgtgtcatgggggtttcatgtatagataattttgtcacccagatagtcagcataatacccaataggtagttttagaatccaaaccctcgtcccaccctctgccctcaagtaggcccagtgtttattgttcccttctttgtgtccatatgtactcagtgtttagctcccacttataagtgagaatatgtggtatttagttttctgtccttacattagtttgcttcagagaatggcctccagctccatccatgctgctgcaaagaacataatcttattcttttttatggccgcacagtattccatggtgtacatgtgccacattttctttatccagtctaccactgatgggcgtctaggttgattccatgtctttgctattgtgaaaagtgctgcaatgaacatatgcattcatgtgcctttatggtagaaatgatttctattcctttggatatatacccagtaatgggattgctgggtcaactggtgcttctgctttaaattctttgagaaatctccacattgctttccacaatagctgaactaatttacattcccaccagcaatatataagtgttccttttctctgtaaccttgccagcatctattgttttttgactttttaacaatagccattctaactagtatcttggaatggtatcttgttggggtttcaattcgcatctccctaatgattagtaatattgagtattttttcatatgtttgttggccacatgtatgtattcttttaagaagtgtccgttcatgccctttgtcaattttttttaacctttattttaggttcaggggtacatgtgcagatttggtatataggtaaattgtgtgttgcaggagtttggtatacagattatttcataacccagtgataagcatagtatctgataggtaatttttcaatccttggcctcctcccaccatctaccctcaagtaagctccagtgtctgttgtttccatctttgtgtccatgtgtactcaatgttagctcccacttataagcaagagtatgtggcatttgtttttctgttcctgcattagttcgcttagaataatggcctccaactccatgcatgttactgcaaagaacattatcttgttcttttttatggctgtgtagtattctgtggtatatatgtaccatattttcttcatcagctccaccactgactggcatctaggttgattccatgtctttgctattgtgaataatgctgtgatgaatatatgtatgcatgtatttttaaggctaaacaatttatattactttaggtatataaccaggaatgggattggtatttctgtttaagttctttgagaaatcttcagaccgctttccacggtggctgaattaatttatattcccaccagcaatgtataagcattcccttttctctgcaacctcaccagcatcatttatttcttgacatttaataatagccattctgcctgatgcaagatggcatgtcatcgtgattttgatttgcatttccctaatgattagcaatgttgagcatattttcatatgcgttttggccatggttacatcttcttctgaaaagtgtctgttcatgttctttatccaccttttaacaaagttatttgctttttgcttgttaatttaatttccttataaattctggatattagatatttttcagatgcatagtttgcaaatattttctcctattcagtaggttgtttgtttactctgttaatagtttcttttgctgtgcagaagctctttcatttaattatgtcccatttatcaatttttgtttttgttgcaattgcttttggcatcttcatcatgaagactttgccatggccaatgtgcaaaatgctatttcctagattttcttctaggatttttatagttttaggttttacatttaagtctttaatccaccttgacttgatttttgtgtatggtaaaaggtaggagtccagtttcagttttctgtatgtggctagccagttatcccagcaccatttacagaagagagagagtctttccccattgcttgctactgttgactttgtcaaagaccagatagtcgtagatgcgaaactttatttctgggttctctaacctgttccattggtctgtctgtatgcttttgtactagtaccatgctgtctcagttactgtagccttatagtacagtttgaagtcaggtagtgtgatgcctccagctttgttctttttgcttaggattgctttggctattcgagctcttttttggttccaaatgaattttagaacagtcttttccaattctgtggaaaatgtcattgacagtttgacaggaatagcattcattctataaattgctttcagtattatggccattttaacaatattgattcttcctatccatgagcatggaatgttttttcatttgttcatgtggtctctgatttctttcagccatgttttgtaattctaactgtagaaaattcttatttttaaatctagtaatatttactacggtttcttgaattttctaggcatacaatattatcaacaaaaagagatcatttgatctcttttttgtaagtttatatcggttttttaaattttcttatcttactacattcagtagcccttctgaggtaatgttaaatagaatgataatgagtgtcctcctctagtaactaatttaattaaaatagttttagcattttaaaatttaaagaattttctgaatggctttatgttttctaattttaatacattctcttttacttagcaatgttattagaaacaattcatttctttcaaactcctttaggcatctattgataaaactatagttttcctttaatgtgttgttataacagattatgtttataaaatttcctaatattcaacaactgaaaatctaaaaaacccactgtgtgaaatgcatttttccacccactgctgtgccaccaccaccaactatgaatacacacatggaggccagcagtcttacacccatcagtatcccaccccagtcactgccagtgtgagtgcaagcacagacaccagcaaccctgcccctgcctgcgctctgccactggtatgagtgcacgcaggaactctgcagccccactcccgccagtaccccaccccagctgacacgcatacaccccactgtgctgccccagctgctggcatgtgtgagttagcacagatcctacagccaccaccctgacaacatgctttggctacgaccacccatcagagtgttgtggccagtggactgggaagacctcagcccctccggtacagaaggttcctaactttgaggggccagagaacaaaagccaggggcccagtaccagccccccagagttatagtatgcagaccaggagtgccgagctgaggtttggctccctggtatcttccagcaaagaaaaaaacccagtcagctgaacccacattatactacaatcaaactcccagagcatcaaaaaagataaaagcaaaaaaacaacaacaacaaaaaaaaacccatccaaaggacatcaacttcaaagactgaaggaacatcaggccacacagatgagaaagaaccagagcaagaactcaggaaactcaaaaagccagagtgtcttctcacctccaaatgtctgcactagttccctagcagtgattcttaaccaggcttaaatggttgacagaaatataattcaaaatatggttaggaacaaagatcatcgacatccaagagacagtcaaaacccaatccaaggaatctgaggaattcaataaaatgatatgagaggtaaaacacgaaatcgccattttaagaaaaaaagaaacggatctgatacagctgaaaaactcacttcaagaatgtcataatacaatagtaagtactgacagcagaataaaacaagctgatgaaagaatctcagatattgaagaccagttctccaaaattacttagacaaaaataaagaaataataaagaagaatgaataaaacctccaacaaatatgggattatgtaaagggaccaaatctatgactcattggcatccctgagaaagagagaaagcaagcaacttggaaaacatatttgaggatatcatccatgaaaattctcctaacctaactagagaggaaacattcaaattaaggaaaggcacagaacccctgtgagatactatgcaagacaatgatctccaggacatgtagtcaccaaattcctcaaggtcaaaatgaaagaaaaaatgttaaagacagctacagagaaggggcaggtcacctacaaaggaaatcctgtcagatgaacagccagcttttcagcagaaaccccacaagccagaagagacagaatacctacattcagcattctttttttttttttttttttttttttgagacggagtctctctctgtcgcccaggctggagtgcagtggcgcaatctcggctcactgcaagctccacctcccaggctcacgccattctcctgcctcagcctcccgagtagctgggactacaggcgcccgccaccacgcccggctaattttttgtatttttagtagagacggggtttcaccgtgttagccaggatggtctcgatctcctgacctcgtgatccgcctgcctcggcctcccaaagtgctgggattacaggtgtgatcagcattcttatggaaaagaaattccaaccaagaattttacatggagccaaactaagcttcataagtgaaggggaaataaactctttttcaaataagcaaatgctaaggtgatttcttaccaccagacctgccttacaaaaggtccttaagggagtgctaaatattggaacaaaagaccattactggccaccacaaaaacacacttaagtacagaaaccattgtgttagtcagggttctctagagggacagaactaataggatagatgtgcatataaaagggagtttactaaggggagtttattaaccaggcccttgtcttctcttcctctatcgattgattatagtgaactccccaagaagctatcagtgcaggctggggaagagaaggggagagaaggaagggtggcaggagtggagaccatgggcatttgagccacttcctcctgtaacttacttgtgcccagatgcatatataccacttccatctgataacggaatgatgctgtgcacaccccacctatggctagatgggtcagaaaacacccagttcttgataggcagttcaggtcgcatggtgacttgatgacccataatctaacattcagtttctaccaaagcccagtaacaggccaagaactgtttctcaaaaggagagtagttatctgcagaagatggcagggccttactccaaatcctagaggctgccactgtgtttcacctacaggggcctgccaaaggctccaaacggcatccctatctgccaccgacacctcaagcaccattggatctgatgggtcatatggcccaagtgtaagaacagcttgcacagcagcctggacctgttgcagaaccttctcttgttctggaccccactgaaaaatggcagcctgtcaggtcactggataaatcggccagagtaacacacttaaatgagggatgtgttgccttcaaaatccaaataggcccactaggagttgtgcctttttcttggttgtcggaggggccaaatgcagcaacttatcttttaccttagaaggaatatctcgacaggccccacatcactgaaccattagaaattttgctgaggtagaaagtccctaaattttagttggatttattttccatcctctggcatgcaaatgtctcaccaataagtccagtgtgttcactacttctcactcactggatccaatcagtataatgtcatcaatgtaatagaccagtgttatatcttatggaagggaaaagtgatcaaggtctctccaaataagacaatgacacaaagtcagagagctaatacaccctgatgtaggacagtaaaggtatactgctagccttgccagctgaagggaaattgcttctggttggccttatggacaggaatggagaaaaagttatttgccaagtacctggtacataccaggtaccaggagatgtgttaatttgctcaagcaatgaaaccacatctggtacagcagctgcacttgtagtcacctcttagttaagcttacgataatccactatcattgtccaagatccatctgtcttctgtacagtccaaacgggagagttgaaaggggatgtggtggcgatcaccatccctgcatctttcaagtacttgatggtggcactaatctctgcaatccctccagggatgagatattgtttttgatttactatttttctaggtagaggcagctctaatgacttccatttgaccttttccaccataatagccctcaccctatcagtcagggagccaatgtgtgggttctgccagctgctaagtatgtctatgccaattatgcattctggcaccggggaagtgaccacaggatgagtcccgggacacactggacccactttaagtcagacctgggctaaaacttcattaattacctgacctccataagcccctactttaactggagaacgacaatgacattttgtgtcccctggagtcaatgtcagctcagagccagtgtccagtagtccctgaaatgtctgatcatttccatttccccaatccacagttgccctggtagaagctagaggtgtccttgggaaatgattggagaaagaattaacagcataaattgtcagtagtgtagtggggtccttacacaaaaagacccgacctctccttcattcaaggggttataggtctgtaaactggttcaagtactgaaattgattgacgggccatgattccctgtatttgtaattcagattagtcttttgtttactcgatctgaaagttctctgcttatataaattaagtaagaatgcagtaggcttcgtatcaatttaacttctaggaacaccatgattaattagccaatgtcagagctcaacataagtcacactattctgattgcgactttgcatctgctgtccattctggtagctacacccaccttgcctttgatggttgagtgctgccacctggcccctgccacctcgggatctaatttttcccattgcatttaaattttgcagttgaatggctgcagtttccactgttagatctggcatatagagaagagcaatcacagagctcttcaaagatggcaggtccaccctcacaaatctatttcacaaagtattggtcaaggatatatcttctggaccctcccagctgggatgagtaagtctaaagtgactaatccactccagcatcccaatctccctaagcctttggatccctttctttacattaaaccaaggaagatcaggcatttccagctcgctcacagtgggccatcttttaatccacatttcagctaaccaagcaaataaactattagaacctcttttaactccccaagctacaacattaaatgcagagtccctgtttagtgggcccaaatcaataaattcagcctgatccaactatgttttttccacaattatcccacacccttaatgtccattcccatgactgttgttcagatttctgtttatataaattagaaaactcaagcagttattttcaggtgtagcacaccccctcatgggtcacactctcatcctcacctctaagggcctactgggactttagactagttataggtctagaagcaaacaggagtgttgggggtggctcctaaggagaatcaacattatcttgcctggaaactgcctcaggggaggccatcactgttgcctcaggcaatgtagggtttatctcctcagacaaaggtggaaaggctgagagcagcatgggttggggaggggatgttgccactattggagttgaggaaggtatttcttcaggcaaaaaaaggtttatcagagtttacacgctcaatgtccccagcttcatcagggtcctctcacacatccccatttcaagttgcagggtaccattcttttccaatcaaggccctcactttaacagtagacacctggtgaggttgtacatgcacctttcactgcaggtcagccatatacacgataagagcttgtgtctgtttttccacaatttcagctctttctcgacaggagataagactctcactcagggctatcttagcagatttgaggctcagtatctgcttctgaagccaggagacagaatccctgagttcattatatattttcatcattttgtccaccaaacttaggagcaaccaacaagcttcattattttccttggttccccacatatgatcaaaggtattaagtatacagttgctaagttccttgcctctaatcaccaatgcatcaggaatgtcaaatgcatttattttgcataactttctatacagttcatgccaaggattataagtgttctccacactattagaagtagagtccttaacatttttgggtctaatcatattaagcagccaagtccagaaaccctaaaaccaatgaaagaactccaaccttaatattttgttcctctagaaccactcctggtaccaaaatctgtattagtcaggttctctagagggacagaatggaatagatatatctatatatctatatctatagatatacatagagatagagatagagatatataaaggggatttactaagtattaactcacaatcataaggtcccacaatacgccatctgcaggctgaggagcaaggagagccagtccgagttccaaaactgaagaacttggagtccaatgttggagggcaggaagcatccagcacaggagaaagatgcaggctgggaggctaggccagtttctcttttcacatttttctgcctacatatattctagtcacactggcaggtgattagattgtgcccatccagattggggttgggcctgcctttctcagtccactgactgaaatgttaatctcctttggcaacaccctcacagacacacccagaaataatactttgtatccttcaatccaatcaagttgacactcaatattaaccattacaatcattgacactataaagcagccacaccatcaagtctgcgtaataactagctaacaacattatgacagcaacaaattcacacataccaacaccaaccttgaatgtaaatgggctaaatgcctcaattaaaaggcataaagtggcaagatgaataaagaagcagacccaactgtatgctgtcttccagagactatttcttatataatgacacctgtaggctcaaagtaaagagatggagaaaaatataccaagcaaacagtaaaaaaaaaagcaggggttgctattctaatttcagacaaaacagtctttaaaccaacaacattcgaaagagacaaaggaaagaattacataagggtaaaggattgaagtcaacaagaagagctaactgtcctaaatatacatgcattcaacacaggagcacacagattataaagcaagttcttagagaccttcaaagagacttagactcccacacaataatagtggtagacttctataccctaccgacagtattagccagaccattaaggtagaaaactaacaaagatattaattataagtgttgggacctgaactcaacacttgaccaaatgggcctaatagaactcttccaccctaaaacaacagaatatacattcttctcatttgcacatggcacatactctaaaataaaccacacaatcagaaaacaactctcagcaaattcaaaaaatggaaaataaaattacatcaaacacactctcagaccacagtccaatgaaaatggaaatcaatactaagaaaatcatataaaaccatgcaattacatggaaattaaacaatctgcttctgaatgacttttgggtaagcaatgaaattaaggcagaaatcaagaaattctttgaaactaatgagaacaaacatacaatatagcagaatctctgggacacagctaaagcagtgttaagagggaggttgacaatgctaaccacccacatcaagaaattagaaagatctcaaattaacaacctaacattacatctagagaagctagagaaacaagaccgaaccaaactagcagaagacaaaaaataatatgttttttaaatacattgcagatattattaggtaaaatgtattcagaattattctctatattcctttgttagagtgatatattattttatttgttgggcacctttggcagcttttttacaagttattttgggctgggcacagtggcttatgcctgtaatcccagcactttaggaggccaaggagggtggatcacttgagggcagaagtttgagaccagcctggcaaacatggtgaaaccctaactctactaaaattacaaaaattagccaggagtggtggcaggttcctgtaatcccagctacttgggaggctgaagcaggagaattgtttcaacctgggaggtggaggttgcagtgagctgagatcgtgccactgcactccagcctggattgacagagcaagactccatctcaaaaaaaaaaaaagaataataataattaaggttattttggcttgataaaatccatgtaatgaatgaaaaatctggtggtccaagatggccaattagaagcagctgcagtctgcacctctcacagagaagaatgaaagtatcgagtaaattctgtaccttcaattgaggtatccaggtatccaggttgtcacattgtgactgactaggcaattggtgcaacccacaaagagtgaggaaaagcagggtcaggcgacagtccacccaggagcagcacagagccagggatcccccacccctagccaagggatacaatgagtgattgtgcaaccctgccaaggaaagtgtacttttcccatggatctatgcaacctgcgtatcaggagatcccctcgtgggcccatgctaccagggttttgggtctgaagcactgagctgtgcggactcccagcagctgctcaggcatgcatggagacacaggagtttttgcatactccagccccgggaattccagtaaggcaggagatctgttcattcccctaggaaagtggctgaagccagggagccaagtggcatcattcactgggccccactcccacagcacctcacaagttaagacccactggcttggaattctagccagccagcagcagcagcaggctggagattgcccaagatgaccatgtgttttacacagagtttatagtttcccttttaaatttgttttgattgaagagttacccagaagtatgcttattaatttccaaggagattaaactttttagcaaactttgtataaagttctttattttattgaatttgttatttaattttattgaatttgattaaaaaaaaacacaaactacaaaatttctaccttaaaattgtagaggttttcctgaaaccaagcaccatacaagcacaaaacgtattttgtaaatgttcaatgaacatatacaagaaagattcttcgttgaaaggatgtaagttttaatgtacatttattaaagtttattgattgtatgattcttttctgtataacttttttttgcttgtttttaactagacctgtgtaattctgaaagagaaataatttgtctctcatgatagttttattttcccaaattttttcctcatgtagttagctgctgtatcatttaatacagatttataaatgtaatatactcttcataaactgttcctttcattattatataacatgcctcttcagtgcatttaaccttacatttaaccttgtctgttattaatattgccatttgttatgtaaaattaattgcaatcctgccagaacatagatgttctgggtcttattaagaataaccaaagatttccctcctttagggaaagagattatatgagctactctctatgttaaatctactctctatgttaaatctttctactgtttaacacttacgtcacaaagctatatatgttctaagaacagggtccacacagtccactgttcatacaaacagtatccagattgtgtcaggtgttaaggttggctttgacttttcaacaggaacaggcctcttgtttcataggtcatgctgacccacttagcctacaatcctacaataaagatcttctatccttggtcttatctttatgcgactgaacaacaaaacagctgcaaggttctaccacatgctcctttctttttatttgaatatgtctcttatctcttcactcaattctcaatttaagctgttaacactgcttaagcggggtttattttcttgtacatagcaaatagctatgatttgtttgtaccctagtctacaatctgtcaactatgtccctaaccactcttttcccccatcagtatgccctacttcacctctacttcttccttaaccccaataagttgaagcccatagactaccttcacttctcctttctcctccccaacttcattctctgcaccagttataaccttgggaagcttctactttccattgttaccacaatcaccagctcctaagttttctgaatttgggtagtacattttagaaatgtcttatccttcccgtttcaggagacttgcttatagatcacattttgagatactatgttgttattcagatagatgtatagatgaaaacaggaaggagggagggaggaaaggaggaagggagggaggaaggaaggaaggagggagggacgcagggagggaagtggggaaaggagggaaggaaggagggaaggacaagtattgctgctcaccactgtggccttgttgccttgcctctttattttctccatcctaaggtttctgctctggttcatttattgctcagttagagtattttctcaagaaattttttaaaagggaccatgccaggagttcaatgtcacagggagctatgatcgcaccactgactccagcctgggtgtctgagcaactctctaaaacataacaacaaaacaaaataaaataaaaggggtacatggctgatatactctgaatttttatttatcctcacatatctctctgtcactctgacaggtcaattatcttatttgagaagactctgggttccaattctttaattgatgctatttcactatcagccagctttcagtaaattaattaaaaaataacagaggattccattgcccaaagctttgttcatatttccctttgttggttgtttgttatttctacctagaagcctataatattatcttcattattaaagttccaggattcactcaggacatacctggtgtgtatctcgtctcatcagtaaagcccgcaacttggaaagctcttacactctagtctcaaaactgtatttaccttagataaattgttttttagtatttgtttaatgattgcctatcttccatctgctcttttttttccttaagaatctccaattatttttatggtagggatcctcaaatcttgcattcaagttgcctacaattttcatttgtgctttgacgttttccctgcacctggtcatccagtttaccaattcagatgtcaataatcaccatccttatcttaaatgtatctactgagttatttgagaaatcatggcattaaagtcaaagaagtcttttaaccactgccttaagtgtggttactttttttcaattcagccattcttctgctcttctaacaattctcttctactgggtttgtgctctaatttttgtctgatattttcatctctcatctatggtaccctcacatttgtggttatttatctctgatagttatggggacctcaggtgtactgtggagaattctgaatggctggactcccatggatgctggaaggagaagcagcagctgccctcaccaccccagacctgagtgtggaaacctcaggctcacatccccctcccccagctctccatatagaaaaaaagtaaccaaatttaggtcactatgtccccaaaaatgatactgttcatccttttccccaatatttgtctttaattagtgaataaatgaactatctgagcttcatcgttggaaacaagatatactgagtgtgatggttaatatggcgtgtcaacttgattggaccttattattgtctttatttgaagataatgcatgatctcagcacatgtgtataggctcaagttgacaaggggtggacttgcgatggttaatactgagtgtcaacttgtttggattgaaggatacaaaggattgatcctggatgtatctctgagagtgttgctaaaggagattaaaatttgagtcactgggctgggaaaggtagacccacccttaatctgggtgggcacaatctactcagctcccagcgtgcctagaaaagaagcaggcagaaaaataaaaggagagactggcctagcctcccagcctacatctttctcccctgctggatgcttcctgtcctggaacactggactccacgttcttcagttttggaactcagacttggctctccttgcccctcagcctacagacagcctatgaagggaccttgtgattgtgtgagttaaacttaataaactcccctttatatatacaaaatatatatatataacatatataatacatatataaatatatgtatatatagaacaaaatgaacctagttggttgctcctaagttcactgaacaaagaaattttaaaaaattatgaactcaaggattctatctcctggcttcagaagcagatactgagcctcaaatctgctaagattgccctgagtgacagtcttatctactgtcgagaaagagctgaaactgaaaaaacagacacaagaattgcttgagttttctaatttatataaacagaaatctggagaacagccatgggaatggatattaaaagtgtgggatagtggtggaaggaacatggagttggatcaggctgaatttattgatttgggcccaccaagtagggactctgcatttaatgttgcagctcagggagttaaaaaaggttctaatagtttatttgcttgattagctgaaatatggattaaaagatggcccactgtgaatgagctggaaatgcctgatcttccttggtttaatgtagaaaaagggatccaaaggcttagggaaattggcatggtggaatgaattagacactttagacctattcgtcccagctgggagggtgcagaagatatacccttgaccaatgtcttgcgaaacagattcgtgaaggcagcacctgcatctttgaagagtcttgtaattgctcttgtctgcatgtcagatctaacagtgagaactgcagacactcgactacaaaattaaaatacaatgggagtaactggatcacaagatggcaggggccaagtggtggcactcaactatcaaaggcaaggtgggcatacctgctgtaataaacagcagaggcaaagcagcaatcagaatagtctgactcatgtagagctctggcattggctaattaatcatggtgctcctagaagtgaaattgataggaagcctactgcattcttaatttatataagcagaaaacttctaggtcaaatggacaaaagactaatttgaattacaaatacagagaatcacggcccctcaatcaatttccagacttgagccagtttacggtttacttccccttgaggaaggaccccaccatattaccaacactttatgcagtgattctcccatccttccccaaggagacgtcatggtcatggaaatcactggtcttaccatgttccccatcatcctgaagcagctgtattgatagaatggtggattagcctttcaaagtcacaattccaatgccaactaggtgacaatactttgcagggctggggcaaagttctccagaaggccatgtatgctgtgaatcagtgtccaatatacggtactgtttctctcacagccaggattcacaggtccaggaatcaaggggtggaagtggaagtggcaccactcaccatcacctttagtaatcagctaccaaattttttgcttcctgttcccgccacattacgttgtgctggcctagaggtcttaattgcagagggaggaatgctgccaccaggagacacaacaattccattaaactggaagttaagattgccacctggacactttgggctcctcctacctttaagtcaacacactaagaagggagttacagtgttggttggggttactgacctggactttcaagatgaaatcagtctactacttcacaaaggaggtaaggaagagtttgcatagaatacaggagattaattagggtgtctcttagtattaccatgccctgtgattaaggtcagtaggaaactacaagagcccaatccaggcaggactacaaatgacccagacccttcaggaataaaggtttgggtcactccactaggaaaaaaaccacgacctgctgagatgcttgctgaaggcaaaaggaatacagaatgagtagtagaagaaagtagtcgccgggcgcggtgggtcatgcctgtaatcccagcactttgggaggccgaggcgggtggatcatgaggtcaggagatcaagaccatcctggctaacaaggtgaaaccccgtctctactaaaaatacaaaaaattagcctggcgcggtggcgggcgcctgtagtcccagctactcgggaggctgaggcaggagaatggcgtgaacccgggaagcggagcttgcagtgagctgagattgcgccactgcagtccgcagtccggcctgggcgacagagcgagactccgtctcaaaaaaaaaaaaagaaagtagtcatcagtaccagctacgaccatgtgaccaactgcagaaagaaggactgtaattgtcatgagtatttcctccttttgttaaaaacatgtttttgcatgcatacacttgtactaagaaaatatcttcattttatttcctttctcctttatcatgtgacataagatttattgacttcacatcagcatttaagtactgttaactttatgtatttgggtcggggattggtgcgtttctggttgtacgaaggatagttgaattatgttacgtgtcattatgaccttattattgcctttatttgaagattatgtgtgatctcagcagatgtgtataggctcaagttgacaaggggtggatttgcgatggttaatactgagtgtcaacttgtttggattgaaggatacaaaggattgatcctgggtgtgtctctgagggtgttgccaaaggagattaacatttgagtcagtgggctgggaaaggcagatccacctttaatctgggtgagcacaatccaatcagctgccagcatggctagaatataagcaggcagaaaaatgtaaaaagagagactggcctagccttccagcctatatctttctcccatgctggatgcttcctgcccgtgaacgcgggactcctagttcctcagttttggaacttggactggctctccttgctcctcagcctgcagacggcttattgtaggaccttgtgattgtgtgagttaatacttaataaactcccttttatatatatatatatatatatatatatatatatatatatatatatatatatatatatatacttcattagttctgtccctctagagaacgctaataaaccaaggttccgttttactgtattctactacaaggctttgagaaaatggtaagtggtgttaacttacaggagatcacagacactggtgaaaacctaaacaaagctagacatactttctctagaaggaaaaagcccttacgtatacacagagggtggccaggtttctggaagtccataaacttcagattaagagaccaccaaggagagactgtctgtcatttctctgtttttcagagtaagattatcaggaccgtagaaactgttcttattccttggcctcactgaacacttgctgctctggcaccagaaacagtcttttctataatttatttattttttgagacagagtcttgctctgtcgcccaggccggagtgcagtggcacgatcttggctcactgcaacctccacctcccagattcaagcaattctcctgcctcagcctcccaagtagctgggactacaggtgtgtaccaccacgcctggctaattttttgtatttttttagtagaggcagggtttcaccatgttggccagggtagtctagagcttctgacctgaagtgatccacccaccttggcctcccaaagtgctggggttacaggcatgagccactgtgcctggcccccagaaacagtcttaatgttccttttgaacagaatcctccccttggctggatgaaaggattataagttatagcaacataagagctggcattcccaacctagaactttaaccacccacctccttttgcataaatctagagatgagagagagagagctataaaaccaaaggccttctaaagcaaaagacacctttggtaaatagctaaaaagatttctacagcttcaaatattagacactttaaaaagtgtattaatttgacccctatgggtcttacattagcatttaagatgtatgtccaaaagagcattgcaccagcttaatctttcctgaaaacttgttgtcccatgaagactgtcctttgatgagctcattcaatcacatgacttcaaacgctcctcatatgataatagctcctatttcaataactctagttcatttcctctctcctcaacccggacccatatgcataaacatttggacacgtccacttaaaaagtttcacttcaatcctaacttgcccccatgttgtccttatcatcttccccctattccattttactctccctccacaaagcttgctccttctggttttccattcctgggaatggcactattattctctcagctgcccaagttaaaaacccacaagtcacctcgactcctacctctctctgaaagacagacagacagatagatagatagatagatagatagatagatagatagatagatagatggatgataggtagatatagatgatagatagatatagatagatgatatagatagatagacagacagacagacagaatctatagatacaggtattcaatcagttaccaagcgtcgtcccttccttaccctatgcagatatgttcccccttcccattcccacagccttaacctcagttcaggccactaccatctcttcatttaaccacagcagtctcaagagggtcctccatctcctgattaacctgcctctagtccattccccacagccagagtgatcttttagtttttcttttgttttgtttttgtttttgttttcaagatggaattttgctctcttgcccaggctggagtgcagtggcacaatctccactcactgcaacctccgcctcctgggttcaagtgattctcctccctcagcctcccgagtagctgagattacaggtgcacaccagaatgcctggctaatttttgtatttttagtagagatgtggattcaccctattggccaggctgggtctcggactcctggcctcaagtgatctgctcaccttggcctcccagcatgctgggattacaggcgtgagccaccacgcccagcctagaatgatcttttgaaagcacgtttgattttgttgactcctcgcttctagaagcacatcttcagaataaagactacatcctttcccataatttgtgagcactgaatgctgtttcctgctctatcctagactcctctttgactagtcctccacctgaaccctggacctagccagactgagctacttgcaactccctgaatatgctggactctgactctgaagtctctaggcctttccatgcactcttccctctgctgaatgccctctcacctcttttgcacttgcctgaatcccattctcctttctagactcaatttagccattatcaattctaggatgtattatatacttcacagtctccaaaactctctgtgcgttcctctatcatcaaactgtagccacatatccccactgtttcaggcttccaaaattctaaagttgcccttttcttttcttttttgaaacacggtctcactctgtcacccgggctagacagcagtgacacaatcaaagttcactgtccttttattggccaataagaatagtataagttttggcaggcacagtgactcatgcctgtacttccagcactttgggaggctaaggcaggggtggatcacttgagtccaggaattggagaccagcctgggcaacatggtatggcaaaagcctgtctctacagaaaaaacaaaaacaaacaaaaaaaaaaacacacacacacaaaattagccaggcatagtggcccgtacctgtaatcccagctactagggaaactgaggtgagaggatcacttgagcttgagaggtcaagtctgcagacagccgagatcacaatactgcactccagcctgggcaacagagcgatcctagctactcgggaggctgagtcaggagaattgcttaaacccaggaggcagaggctgcagtgagccaagatcatgtcactgcactccagccttggtaacagagtgagactccatctcaaaaaataaataaagagcacacattcttctctacagtctaataagcattagtttcacatggtgaaactcccctctctactcaaaatacacgaattagccagttgtgatggtgcacatctgtggtcccagctactccagaggcttgtgtgatggcacatgcctataatccagctacttgggaggctgaggcatgagaattgcttgaaacccggaggcagaggttgcagtgagccaaaattgcgctactgcactccagcctgggtgacaaaacaagatgctgtctcaaaaaacaaaaaaaggaaagaaagaaaattgacacgattgagtagaaaatgtttgcaaaatgtagagattagtagccagaatatatgaataattagttcttacagatcaacaagtaaaaagacaacagaaatctgatacaaaatgcttaaatgacaataaagcaaaaatacctaatggctaataaacatatgaaaatttcaaccatattattcattaggaaaatataaatcaatactatattagacctactagattggcaaaatctaagaagtctaacagtcccaaatattggtgaagatatggcgctacagaaactcatatacactactggcaagtaaactggcatctttctggaaaacaatttggcattatcaggtaaaatgaaacataattgtaccgtatgatttagaaattccacttctaggtattgactagagtaccaacagacatgtacagagatgtttatagcaacattattcataatagtgaaaactggaaacaacctaaaattcaatgaccaaagtatgaataaatgaatagtggaatatattggtgaaaatgagtgaataactcttcaacatggagaagttgcacaaaaatattaagcagaaaactcaatttgagacatttataaaaatctttttataatctataaaaaaatcccaatgtgccatcaccaagggcaagtgaaaaattgttgactccagtgaggcagaactaaaggaagttctaacaagggaaaattgcagcacactgcactgtcgagaaatgtaaaggatctgagattttactccacttgcaacccaaattagtctgccacagtttcactgttggcagaaaaaaacaaggcttttgggtcagagacaaggaactttattactcatagtattcatacaacaattagcatgagcaacagcatgtttcatcagtttccccttgcctcaagtcttatgggggtaacatggatgggcccagatggatctgacctccttggcctcccacagtgcagggattacatcacgtccagcctcaattttctttataatgccttttgacgaacaaaaccctttactgcaactggatttatcagtcttttagggtctgtgattcttttttattttatagatactctttcccattccattgtcataaaaatattctcctatattttttccaaatttaaaattcaacctttttatttacaacttaatcaattttagtggacttttgtatatggtgtgaggtaagaatctaatttcattgtttccctttgtgtataatcacttatacagtactattccatttgttctgcagttccatttcatcatatacacatttctatatatgtacatgtttctttatggactttccattctgtttcagtttatttatctttgggtcaatataaaactatcttaattactgttgtttaataataagtatttggcatctgagtagctcaagctctctcatgctcctcctattatctaggagtgtctaggctgttcttggtcatttgttccggttttatgaaaaacacttttgagattttgactggaattttactgtaagtataggaacaattggtatctttataacagtgaatcttcctagtcataaacataaaataactttccatttacttaggtatttaaaatatcttttaggctgtgcatggtggctcatgcctgtaatctcaccactttgggaggccgaggtggaaggatcgcttgagctcaggcgttcaagaccagcctgggcaacatggtgagacccccgtctctactaaaaatacaaaaaattagctggttgtggtggtgcacacctgtggtcccagaaactcaagaggctgaggtgagaggattgcctaagcttgtggggtggaggttgccgtgagccaagttcacgccactgcactccagcctgggtgacagagcaagaccttgtctcaaaaaacaaaaaagtattttaatcaaattgcatgttagtcctgtacacgttatatttattccatgatgccttatttatcatttttagtcgtattattaaaatacattttcctgctttgggggactaacgcatagaaatacaaatgatttctgaatattgttattacaggcaaccactttcctaagccctcttattataataagtcagtggttttttaaatattttcttggtaaataatatcatctgttagtgatgacaattttgttcgtattttcctatccttttccctttcatttttttttttctttattttgctggctaggacttccagtgaaaatgttgaataggagtggtaataggtggcaattttctcgtttctgattcttatagggaatgcttccagtatttctactttcagaatatttgccacagttttttgtatacagaccatgttgggttaagaaagttccttctcttcctagtttgccaagtgtattgaatttcaacaaacgtatatccacatctgttgaggtgataatgtgttatttttcttccctttaacctattagaatgataaatggaatttatagatttttctattaaaccgtggttacattcctgggataaactcaacttggtcacagtgtatcatctgttttatatatactgctagatttagtttgttgaagttttcttcttttttcctctatgtgaatgtggttggcctgtcactttcctttcttatataacccttatctggttttgttatcaaggtttttgtctaacacaattatttaggggaaagaattataagaaccacttcttcttcttgggcatacagttcaactatattggaaccacctgaatgagccctggccactggaatttgaagtcacttatgctacttccaggactggctcgaaaatctctcatgcataatcttcctcttttttccatatccacgctgacttagaggttacaggctgactgtgatggtggcacaaaacagagggatcctcagtctccgaatgactaaatggaatagaacactttctatgctctggacaaagcacattagattataaaatgcataagcaataaatttttagtgtgtcactaataaagaacttggtacatcagttgaacctctgcacatgagaataacatagactgtaagatcgtggcccagttcacatgaatttaaaataataaaatgtatacccaagaaactctctggccaacttcagaactggaacactgccagtccctttatgctgtttatctgggtgcctggttctcctctagcctttctcccagtcatccttacctcctctcatccaaccggttagcactagcctgaattttttgtttatcattatgttgttgcctttttgtttgctttgttttggttttctcttatactaaaagacttttcaaatatattttagaacagttttagctttacaggaaaactgataaggaagtacagagagttttgttgtagacacaggttaaaaaacaaaaaaaagtatggactttacacaaacctcctctccctgactgcacaaacacaagcacagttccccccaattatttgcatcttgcattagtgtggtatatctgttacaactgatgaaccaatattgatacactattactaactaaagttcacagtttatattagggttcaccctctgttcagttaattttcaaaatgtcatttcttttttttttgagacggagtcttgctcttgttgcccaggctggaggtgcaatggcatgatctcagctcactgccatatccgcctctgaagctcaaacaatgctcctgcctcaacctcccgagtagatgggattacaggtgcataccaccacactcgctaatttttttattttcagtaaagatggggtttcatcctgttggccatgctggtcccaaactcctgacctcaggtgatctgcctgcctcagcctcccaaagtggtgggattacatcgcacccagcctaaaatgtcattatttcttccttgacatatgaattgtttagaagcatgttttaaattttgtaaatgtatggggactttaaaattttatttttgttattaatttataacctaaacactttatagtcagagaagattagctatatcatattgattctttgaattttacagggacttacttttggtctaatacgtaattatgtttgtaaacatcccatgggtgcttgagaaagaatatgcattccctgattgttagtttcagagttctatattagtctattatatcaaattcactgctattgttcaaatctcctctttgcctttttggtctccttgatgtagtactaattgagacagacaatttgaaatcctcctgtatgatcaatttgcaaatttatacttgtatttttctttattttacatagtatgaagcaattttcctggacacaattttagtaaagtgtaaacctttatcattctttagtgtctgtattagtctgttctcgcattgctataaagaattacctgagactgggtaaagaaaagaagtttaattggctcacggttccacaggccgtacaggaagcatggctggggaggcctcaggaagcttaaaatcagggcacaaggtgaagaggaaggaggcacgtccacatggttggagcaggaggaagagagcgaagagggagtgctacacacttttaaacaaccagatctcgctaagaactcactatcacgacaacagcaaggagcaagtctgcccccatgatccaatcacctctcaccatgcacctcctccaatactaggggattaaaattcaacatgagatttgagtggggacacaaatccaaaccatatcagtgtccatgtctattcctaattagcttttaactttgtactcagcgtattaatttctgagagctactgtaacagtgtcaccaactgggtaactgtttgttgtaaaacaaacacatcctctcacagttttacaactgtttgttgtaaaaccaatgcattctctcacagttcttgaggctaggtgtctgaaataaaggtgtgggctggaccatgctccctctgaagccttgaaggaagaatccttgcctgcctcttccagcctctggcagttgctagcaacccctggcattcctttactcattgactcatcactccaacctctgcctctgtcttcatatggccctatgtctctgtttctgtgttcagattttcctgttcttacaaggacacaagagatattggatttagggcccatcctaatcaagtacaaccttgtcttaacttgattacatctgcaaagtccctaattccaaataggagcatattcacaggtttcagttggacacgaattttgttggggggacactactcaatctagtacaatcagctattaatgtagctgatgcaggattttttgctccttagttcagttaaatttgggttatcacatgaccagaaaaaattaggcacgcgtacacactgaaaggcgaggagggcagaatttattaggcaaaaggaaagctctccacaaaaagaggggtccttcatgcaggttttacacctcacaaattgaatgccaggccaccacacacgagctgaagaggcacggcttctcccctgcataaggagcaaactcctcgtggctccaccccatgtgtgggcgcttagtctgagccacattgatttatttcccttactgcacatgtgttgagaaatggaatctttcacagtgggcatgttcattcaggcaagccacgtgtgcacaatgacctaggcaagtcagaggctctccaggaacccttctctatttgcctaggcttgtgcctgtcacctttctctttcatagctagctgttttatagattggtctaatatatcttttaccagtactacaagaaagtggcttacatgattatggaggctaagaggtcccatgatctgtcatctataagctggagacccaggaaggcctgtggtataattcagtctgaatccaaaggcttgagaaccagggaagccagtgatgtaaatccatctgaggacagaagatgagatgtcacagctcaaacaatgaggcaggaaaaaaaaggggggggaattcttccttcctctgccttttattttatttacgccctcaacaaactggatgatgtccacccaccttggggatggctatctcctttactgagtcccccagttcaaatgcaaatcttgtctgtaaacacactcaagacacttcagaataatgtttaaacagatatttggcaccctgtggcctattcaagttgacatataaaattaaccatcacaagtttacccttgtcaacttggcacccataaacatctctttaaaccatacttaactgccacataaagacaacaacaaggtcataattccatctaacacgattaacaatccagcattccaccagaaacactctaacccgtttcccagaagaggtggtaaagtcttcatgtgatgtttactctctccttgatatcccataacttaaatactatgatgtaaaattaatcaaggttgaacactggagccagttaaaaaaattaacaatatttaaacactatgctataaaatcaatgcatcttatgttacagaataaggaaatgagaagaaaacaaagctacacacacacaaaatgtagttatagcaaaatatggaggacatacttatgacaatcacagtctgtgtttctgtaactggtcatatgatcaaagctagtatttattccaccatttattctgtattccctttgccttcagcaagcacttcatctggtcatggtacttacctggtggtgacccaaaccttcattcctgaaaggtctggatcattagtggtcctgtctgaattaggctgtagttttccattgaccttaatcacagggcatgataacactaagagatgccctaaggaatcctgtgtattcccaacatactttaccttaccaccattcggggtagtccagtttctacttggtagtcaggaacaatcacccagccagcactgtaactcatttgtctattgagttagaggcataagaagccccaaatggctgaggagcagtcttaaacttccagttcaattaaatcatgattgcgtctctcagtggaaaatattccaccctatgtaagacctctaggccagcagtgcataagtcatgggaacaggaagcaaaaattttgctagtgggtcaccagggctaatagcgaatggtgtccttcctattctgaccccttgattcctggacctgtgaatcccagtcataagagaaatgcaccatatactggatgttgattcagagcatagacagtcttctagagaaccttgtcccagccctacaaggcactgctatatagctggtgttattactgtcttcaaaatgccattccactgctctatgtagccagttgattcaagatagtagggaacatggtaagaaaattccatgatcatgggcccactgccacacttttgctgtgaactgagtttcttgtaatgctgtgtggaataccatggtcatagatgagacattctgtaagtccacggatggtagttttagcagacaccctgcgcgaagggaaagtgaatctgtatccagagtaagatctatttcagtaaggataaaacactatcccttcaatgatagaggtggatcaatgtaatgaacctgccactaggcaactgactgatgaccctggggaatggtgtcatatcaggggctcagtgttggtctctgttgctggcagactgggcactcagagatagccttggccaggtcagccttggtgagtagaagtccacgttgctgagcccatgcataacctctattcttgtcaccatggctactttgctcatgaaacaattgggtgatgacaggtgtggctggagaaagaggcctactagtatccacagaacaggttatcttgtccactttattaaaatccttttttgctaaccctttggtgagcattcacatggggcacaaatatcttcaccctttttgcccattcagtgtctatccacatacttcatctccaaatttctttgtcaccaattttccagttatattgaactccctgaccatccagccaaaccactggccacggcctatgaattggcatataattgaatatctggctatttttccttctaagcaaagtcaacagggggactgctcaaagttgtgtccaccaggaggatttcccttcaccactgtccttcaaggtagcccagaggtgagatgtagtgctgcagctatccactttagggtggtacctgcatatcatacagaacactctgtaaaccaggcctaagtcttctctttctctgtcagctgatcacagggaagtccccatgaagccaccgatgcaggctggaagagagaaggcaggtagcagaagtggggactacggaaatttggcctacttcttcatgtaacttccttgtgccttcagggcctctcaggcccaatcatgtgtataccacttccatctgatgacagagtgttgctgtgcatatccaactttgtgcgttggtggctcagataacatccagttcatgatgggaagctcaggttgcacggtaacttggtgactcattaagtatcagtctctactaaggcccagtagcaggccaagagctgtttctcaaaaagagactagttatttgttggtaatggcacggctttgctctaaaatcctaaaccaagattcacctatagggacctgccagaagcttcaaacagcatccctatctgccactgccactgaaacaccactggatctgctggatcatatgacccaagtggcagagcagcttgcacagcagcctggacctgttgcagactcttttcttgttctgggccctactcaaaactagcagctttttgagtcaattggtaaacaggctggtataacataatgaaattggaaaatgttgcctccaaaacccaaagaggcccactaagtattgtgcctctttcttggttttaagagcagcaagatgcaagtacttatccttcaccgtagaagaaatatcctaacatgccccatgtcactggatccctaccaatttcactaaggtagaaggcccttgaattgtagtcatatttatttcctaccctctgatgcaaatgtctttccactaagtctaatgtagttcctacttcttgctcactaggtcaaatcagcataatgtcatcgatataaccaatcagtgtaatattttgtggaagggaaaggtaatcaagatccccatgaactgaattatgacatagagttggagagctgatacacaccggagatacgacaatgaaggtgtgttgctggccctgccatctgaaagcaaactgcctttatggactggtatgaaaaaaaagacatttgccagatcaattccattgccttaccacataatgctgaaataaatatttcatacataatttttatatttaaaatgcaaactataaatataatacacatatttacttgtacttgtgcaaataattctataggcctgactgaaagggaatgttccacctttctacctttttttaatgacaaatttctgataaaattccttgttacctaatgaatgacttcagtttcaaaatatgctaaatgcattcagtttccagtagttctgggcacacactgtatgctaagacttggtgaacttgaggactgaaagagtttcttggcctgcttgtctggaaagtgcagtggttccttgcagaccttttgtcttcattattttcaaaatttcttctaaaataaaaatcaaaaggtaaaatccattaagccatttggtagtgtgcatgatcaataagcaatttaataagttaaacacagatgatttataaattgtattcatctgacaaaacaatgtatatcaaataaatgtctactaaagtgaacttggtcttcagctaaatgggagcacttggtattttcaaagtgttgctggtgagtctaatcagaataaatggcttgctttgcagtcacagcctacttttgactcagcagaaacattaattgtcattgttattatagcaagtgatcagttttttagttgattggctccaatctctgccctatgtctttctctttggatgacaaaagccaatgaaggtgtggacaaactgaatagtgacattgcacagtgagagtgaaagaagtagcttatttctttcaggcatattgaaaaaagaaaaccttccttataaataaataaaactaagaagactgaactaagacaatggagggagggagggagggagggaggaaggaaggaaggaaggaaggaaggaaggagggagggagggagggagggagggaaggagggagggaagggaagggaagggagggaaaggaaaggacgcatggatggacagaaggaagaaaaaaagagaagagaagagagagagagaaagaaagagaaagaaagaaagaaagagagggagggaggaaggaagggagggaagggagagaaaggaagggaaggaaggaaaggaagggaagggaagggaagagaagggaaggaaggaaggaaggaaggaaggaaggaaggaaggaagagagagagaaagagagaaagaaagaaaaagaaagaaggaaggaaggaaagaaaaaaaagaaagaagagaagggaagggaagaaagaaggaaggaagggaagaaaaaaaagaaggaaggaaagaaagagagagagaaggaaggacagatggacagaaggaaggaaaaaaagaagagaagagaaagagaaagaaaaagagacaaagatggacagaaggaaaaaagaaaagagaagagaagagagagagataaagaaaaagaaaaggaaaggaaagaagaaaggaagaaagaaagatggagagaaggaaggaaaaaaagagaaaagagagaaataggaaggaaggaagggagaaagacaagagaaaactagcaatcatgtgatttgaagggctgaggacttttagtataagctgaaaatcaaacttgaagtgtacagaaaaagagaggaaagattatggtcaatttagttataaagcaatctgaaaacaaagatataaaaatctatacaattaaatagctttcatgataaaactcctaacgaactaaagagtacagcacaattgtcaagggcatgaagactagagggtagagagaaaattcataatactgagagtgaggtgttagaaaaaaacattagagatttttatacttgaatattaggttataaacggggaaaagagaagataatactttttaaaatcagaaaaatttacctctgaaaacctcttttctctttcaacataaatttatgcctgtattagctactgtcagtgattaactgttttaagtgattcattaacatgccaggttatcttataaattaaagcattttacattattaacttttgatttcagcaacataaatgcttaaacaataaattggtctgtattacctgggttgttttctttaatggtaactaaatagaataatcctcttggtgaaaggagatctggaaccaggggaaaaaacctgtccatgacttcccgaccatttctgccaccagcccaagctgcctctattccgtgacttcctacctgtgaacaattagaaagaatgttttcttttaactcaagtttgatttagatcacaaactgaatctttttgacaagtaatatcaccaaaaaagtatatattttgcattttactgctgacgaaggagcagtcaagttgaatctaagtttcatcattttctagtgtgtaaccttggataaattagtaatcctgtttgtgaattactttcctcttttatctgtaaaattagaaaaagaatagttccatatgtacaattagaaaaataataagtggataaaaaatgtttttattaataaaaaaatatttttatccactgttaggaataaataaggaagtatatttaaagttttgagaacattgccctgcgtatatcaagggcttaataagttattactattaatacaatgcttaacattgagagacatgggtagcttttgtacttaacacagaaagaagctagaaggaacagcttgttttataagagacctactgtacagaaacaaagtttcaaaatgtcccaatgcatctggccctcttgtagtttaaagtgtgaaacacatagatcttttctaaggaatgcatttatttattatatttatatattattaaatatatatatttattatatattatataaaggcacactgaagcatgtttcctctaacaatctaattatattttagaaataatatccaggagtttatataatattaaaaaatctttagatccttatcattgtagattgtttctttttttttttttttttttttagagacagggtcttgctctgtcacctagactggagtacagtggtgtaatcatggctcactgcagcttccaccttgtgggctcaggtgatcctcccacttcagcttcccaagtatgtaggactacaggcgcaagccaccatgcctggctaatttttttttgagacagagtctcgcactatcgtccaggctggagtgcagtggcttgatctcagctcactgcaagctccgcctccagggttaacgccattctcctgcctcagtctccaaatagctgggattacaggtgtgtgccaccaggcccggctaatttttgtattttcagtagagatggggtttcaccatgttggccaggctggtcttgaacccttgacctcaggtaatctgccgcctcggcctcccaaagtacaggattacaggcgtgggccattgcactcggccagttaaaaccttttgttttgcaaattttttattcatgataaaggatacatgtaatatatatgtacatttatatttgaatatatgaatataaataccatggcctgatatgaatgtgatttttagggatagatatgtgtcacagtttgtatttccatcatttaaggttcctttcctaggtcttttaataggactcaattactgacaattaggagtaaaatcagagtagtctgtgatagcagcagctgactgatgtcataggatgacattcatttgattttacaaacaaaataattgaaaatattaataattaaattttgttgtatgttttacctcttgaggtggagtcactacataggggggattaaacaccagaagatcaactttttcggtcaatcttggtagcaagcctttgacctaaatgtattcaacaacagtaagaattttacattaaactctgaattaaataactgacaaattaatctttaaaaataatctcccatgtttttgggaaaataatgtgttacgggctacgcttgtagacagaaatgaagtatttttatgttttcattcagaaaaataatacatgcaattaaataaaaataaggaaattaaactatcagaatgaatattaaaaagcctatactcctcaacagcacatatatttatattctgggttcacttttagaaaatgaaataagaaagcaaactctaattctgtataatctgtatagacttggatataagtttacaactatatatgctaacattttcacaatttttccgatatctgtacagatacctaccattatttactggatactgttctatagtctcttctatctctggtgtttcaccattctatcaaaaacacttacttatactaattatggaaacattaaagaaatttttaggccaggcacactggctcatgcctgtaatcccagcactttaggaggccgaggcgggcggatcatccgagctcaggagttcgagaccagcctcgccaacccatggccaacatgatgaaacccagtctctactaaaaatacaaaaactagtcgggcacagtggtgggtgcctgtaatcccagctactggggaggctgaggcaggataattgcttgaacccagaaggcggagtctgcagtgagccaagattgcgccactacactccagcctgggcgacagagtgagactgtgtctcaaaaaaaaaaagaaagaaagaaattttttaaataaaaaaaaaaatcaccacgttgatctcatgtaaatcactggagtacctttcttgatattctagcttttattagcagtaacaacttctaataatatgaaaataatttcttatctctttggcttaattccttctaagctacaaaatcatttatttaaaaaaaaaaaaaaaaaaaaaaaaccggaaagctacctaccctcgtcattgtaagaaaagtgcaagttaaggagcacagaagtattttgcctttcatatgtctacctggtgcatgctattattatttttgcctataaaaaggtatttgacatatataaattaaaaacctacaaatttaaaactgccacttgaaaatgtgtgctgttaacttcttaaaacaatggttgtgcagttgtcatttgttgtttttacctactgaggacccactgcccctttcttctgatttaatttccttgacttttgttagggaagctctacctcccatcattctcaatctaagtggcctgagtagggtttatcccaatccagctcctgggatggaactatgaggcattttgaagccaatcatctccacattcaaatctcctttggccacagcaaaaggttgagagataggcacataacccaagttgatccagataacactcattctggggcctcttctagagtaactgaatagaaagggcctctttccttgggaaggtgttcagaaataagatacagatatgcaaacatcttgttaccatgaagggaagactgcctaggaatagagccaccagagagaagttcagagataagaaaaagatgtctatagcattcttagagttcctggaagtagctgtgctgaagccatcaattttttttttttttttttttttttgagacagggctttgttctgttccacaggctggagtgcagtggcacgatcatggctcaaggcagcctcaacctcccagggtcaagtgatcctcgcatctcagcctcccaagtagctggcacgacaggtgcgcacaaccatgtccagctatttttttaatttttattttttgtagagacgagttctcactatattgtacaagctggtcttgaactcctgggctcaagcaatcatcccacctcagcatcccagagtactgggattaaaggcgtgagcctttgtacccggactaattttttaaatttaagccagtttgaactgggttcactatcacttctgactgaaagaggcctgaattgtggaaaaggtggattacatcaacaaagaatttactttgtacatggtatactgcttagtgggtcaaaagttaattacttaccaaagtttctttgacctaaagcatcttaactttatttgaaaagaaaattattactggacaaagattatcttaccaaatctgtaataactggttgaatgtgaactttgttacagcgtgctgtctctagggtacaagctgctgcctcagggttgatatcagtgcacctataaacagaaatggaaggaaactatatcctatgtccataaggcaaatctgttactgagtaatatcaaggtatgttccattaattctacacagaacagatttagaaaaaaaaaaattagaacgtattcaataatggcaaagaaaaagagaacaaggatttgttctattgatgaaaaagactgttatattgatacaatgtccaagagtagaagaatacacatacatgcacagacatctgaaggaatttatgaattatacatccaatgaaggagtactatgcagccaccaaaaatgaaatttaaaaggaatttttgataggaaaatgtttatgagacgaaattaaattaaaaacacaggaaatgaaaaaaaacagaaggaaacacagttggaccatgtatggtaaaatttataggtgattttaattttcttctttatacttttctacattcccaatcttctataaatttaagcaactttaaatgtcttatgatatcaaattacttagctaagaaatcaaatttagagatgatctaaaattatgctgcttctacaattacgtagtatgatggagcagtttgaacatgaataatttttagggaagcatagtttgtaatctgagtttttgctatgcttaaatactataagatacatactgtctctttaaaaattatttcattagagttatcatagttaacctgtcagtggaagatctagatgaatatgatatacttacatgtacaaagcctgagggcctatcatagaggctaggaatgcagatactacaccagaccctgaccctacttccaggcatatttccactctgaaaaaaaaataaataaatattagtatagtagaatcaaaatactcttcacagaaaactctcatgctagtgttatttctagcatatatatttctctagcatcatcactcacctgcaaatatatgaaaatagaaatttataatttctgacaactactttgtacttaatattgcataactcaaaattactaatattttgggtacgtaatataagtccataaaagttatctattaccaaacatggctttcagttaatttcaacaaaccattacattaaaaagtatggaaaaatgttaatctagggttggaaatattaatgtgaaagacatcattccttcgcacaaggagctcctagcttagtatttcctaaaataaagtttgtattattacaaaatttatttttgaaaaaagttcctctatcatttttaatacctaacattcatagagccatcagtatatcctagagaattaaaaggtcccccaataatagagcaggacaaaaattctttttctggacagctatatgctaattgggaaaatagtatctgatctttgaatgttaaccatcttagaatgctgttaactataaaatcttcattctactgtactttatctttccattaaatttattttcttgcctataatcttggaagttgcttcttttttagagacaggctcttgctctgtcacctaggctagagtgcagtggtgccatcacagctcactgctgcctttaactcctgggcttgctcaagtgatcctcccacctcagcctcccaagtagttaggactataggcacgaaccacagtgccagccctctataatgttatacatgcatcaaaagcataaatcatccccattaaaaagatcagcttgatggcatttagggaaatttttagcactgaactcccaaaacaactacccagtgacaagctccagaggttttaaacttttggaaccagtctacacatctgacaagtctttattaggtggtagtaaggtctgagaatctcaccaggtggcttctctttgaaaataactatcatggtctcataaataattagaattccaaactagaaataacccaagactttataacaaaatcagctccttttacagcatactttgcagtgcaatttgtgcttgtaaatctttctgggctatcttgagaagaaaagacaagttataaaacagtactgttccactgtatattccagtagatccaaaagttccatcatctacaatgaaagactagtttaataagagctgggacattttatactggagaaatatgaccaagtttaagagggataaataaatacaatatagatctttgaaacctgaaagctgtttgttccatcctgagaaaacccagttcatcttatcttcaaacaaatctaacaacccaaattccttacatttaaaaatcacaatgtcagtattcattccttctgctattaatttaaaattgatggcgatcacttcaataaatccatttaaataaagtgctagggtagactattgtctgctagctgcatgtaacttttttttggtaacaattaaatgaaaaattcagttcctcaatagcactagccacatttcaagcgctctgtagccacatgtgaggactggctggtgctagagtatgctattcagtgggtttaaaaatatttccccactccagtaacacaactttctttcatgtttgttaagggtgctttctatgtgctgagtaaatcaaataataccatgcaattttaatatgtaatactttaaaaatattaataagcaatgtttccggaatattttgtttccaaacgtgttatactatcgcttctctcagggacatgtgttcttcagattaacaggcgacaggaaaagatacgcctttgcatggtaagcagtcagggagctcatgagacagagcagccccctggcaaaggagatgcgtccccggcacactcattacttgtagctacaggaaaattctcaattacggcgtcctggctgtcaatcatctgcaagtggaccccgcctgctccggctcagggcggtgatagtcaccgttccggccctcctccaccgcacttcttcagaaagccgcaaccctttcccgtcagagcccctcccctcctcgcaccctgccagttcggcagccgctgcctccagcgcgtccaaaagcagaaacgtgtcctccgcgggctcgtacacgtcgctgaaggcgccgcggcccacgtgcccgtggaacggcgtagcgaagttctcccctgccatagtccttcgctgcgttccatgcgcgtgcgcagggcgtgcgcatgcgcatgcgcatgccctcaccctcatgcgcaggcctaggagtggggctggcgtcccgggcgaccagtgtgttgttgttgggtcttaattctaaatttgtcagtggctctccttgaaattgctaagtagacagttgtataatccgtgactattgacatttgctttcttctttggaacatttaaattttattctgtgaactagaacctgatagtgggcattctgagttgtttttgactaaggtgaatgttctttcttcattctaatgatatttggaaattctgttttattcctagtttgcaaggatttgaaaaaatacataataaattttactgtttttttgtcagctgaactttaagctttacgctataaagatgaagactttcctcgtttttttactgtactttataaattgccttcctgatgaatcatgaatgcactctttttataaaccttaagcaagatgatgcggtttaatacactgctgaattggggaggctaataatctggctccgtttttttttaccaagattacgctaccctcgttatgtgagttaggacactgtttctggaacattaggtagaaagccttaaaactggctgggcttggtgcctttttgagtgaatggatctttgatgttttggaacatctgtaagttattagactattcaagtatttgcattctttttgagtcaatttctgaaatttgtttcgcaatgaaacatttttacagctcgttttttaaatttgagaaataaaaatacagaaaagtatttgaggtacaaattttattttattttatttctacttatgtattttttttttttggagacagagtctcgctgtatcccccaggctggagtgcagtggcgcgagctaggctcactgcaacctctgcctcccaggttcaagcggttctcctgcctcagcctccggagtagctgggattacaggcgcctgcagccacggctgcctaatttttgtatttttagtagagacggattttccccatgttggccaggctggtctcaaactgctgacttcaggtgatccacccgccttgggctctcaaagtgctgagattacaggtgtgagcctttaacgcacccggctgggttacaaatttcaaaaccccaagttttaaacccagaaatgacagtattttctcatgtttccttaaaatattttttaaatacaagaactaaaatattacaaataagatggatgttctttctctatttgccttcagtttaattgtgtaacattctctccaaggctcttatggatttagtgtatgtccatctaatccatgtaaaaacatggatcttgtatttatacgtttataaacattcatatctttataagcaacatacggtgtattttaaaatttacataactggtactaggttggacatatttttcaaatttctttttcagtcaacattatatgagatttatgttttgatatatggttaggttactcctcttaactgccatatagaattttattatgtaaaaatatgaaaaatatatatatatagaaagagttgtacttgatctcctgggttcaagcgatcctcctccctcagcctcctgagtagctggaactggaaccataggtgctctcgcacccagtattaggaatatacaaatgtctttttatccaaaaatacaaaataaattatctgtaggcatggacagtgacagcagtaaaacattatatattttgtcacttgaaaccagtaactgattgttatagtgatttcctaaacatctgctagccttttcttcagtcgttttctccagctgacttctctgaagttattggtgaggaatactgccttgggcttcctgccacagttcattaattaaagtaaaacgctattctaatcattagaacttgccatttcccataacacctcccgttccacccattgcacccaatacagggtccttctctttttttaggaatttctttgactacaacttctgctgtagttaacaggccaccccagcagcatccagtaaagcacttctcacaacctttgttttgtcaataattccttttttccaccatattcacaaaatctgaccgtggcatcacaaccagcttctcaggaactgcataattttctggactatcaaagatccttcaacacccgcatttttagcaatagtcattgcaggaattttgagtgttttcttaatagtttctgtaccaattttttgatcttcattagctggagtcaatgagtccaaggcaccaattcatcgaagtagggtacaaccccctcccagaacaatgccttcttcaacagcagctcttgtagcattaagggcatctgtaactctgtttttcttttcattcacttcaacgtgacttgtcccactaaccttcagcacagctactccatctgaaagttttgccagctgttcattcagtttttccttttcatattcactagttgtgacatccaactgctcaatgatttcttgaatacgtttttaaatttgagccttgtcaccttttccttttaagagcatagcatcatctttgatcacagtgacctctccaacttctcctaagtcatgaggctgaacatcttcaagatttgaggtcaactcctcttctccaaacactgcaccaccagtagcaattgtcatacctttaaggtggttctttctattgtcaccaaaccctggagctttgactgctacaacctgaagaccaagttttcgcctattcaaaatgagtgtacttagagtttctccatcaacattttcagcaattatgaccaaaagcttacggtgagcattggcaatttcaagatcaggtacaatggactggacactagaaattttcttggaattcacatttccgaccttttgatgtattaataaagtatggagaaatatatcctcaaactttcatgccttcaataatttcttttttttttttctttttttttagatggagtctcactctgtcacccaggctggagtgcagtggcacaatctcggctcactgcaacctccacctcctgggttcaagcaattctcctgcctcagcctcctgagtagctgggactacaggtgcatgccaccacacccggctaattttttgtatttttagtagagacggggtttcaccgtgttagccaggatggtctcaatctcctgacctcgtgatccgcccacctccgcctcccaaagtgctgggattataggcgtgagccaccacacctggcctcatgccttcaataatttctaattcatcggtagcgtttttccatctttactgtggtgaaaccctttcttctgacctttttcattgcatcggaaattaggttgccaatttctttgtctccatttgcagaaattgtagcaacctgagcaatttcttcaggggtggtcacaggtttagactgctttttaagttcagcaattacagcatcaacagctaacatcacacttctcttgatttccactggattagcacctttgctaaacttcttgaagacttccttggcaacagtagcagtggtagtgccatccccagcctcttcatttgtgttattggcaacatcttgaacaagtttagccgcaatatttttatatttatcctttaagtcaatggaccttgcaacagtcacaccatcttttgttactttgggacttccccagttctgctcagtaatcactgtttttccctttggccccattgtaatggctacagcagtgagtaaaaggtctacaccttgaagcattaagactcaggcatctgaaccaaaaattgtacatctttggcataaacccgagtgagatgaggagccaggaccctcgacactggtgtcatctgacttaagactgtgggtaattgaatcatttctgcggggcagtggcagggcttgcgcacgctgaccgcaggctgtcggtgatgagtgagggggcttgttctaattcttaaaggaaaggctttcagcttttcctcgttgagtatgatgttagctgtggatttgtcatatatacccagtttgcgtgtatttttttacccacaacatgttcaacatttttatcataaaggaacactgaattttattgaatgctttttcagcatctattgaaatgattacatggcttttgttcttggttctgttgacatgatgtatcacacttgttattgatttgtgcatgctgaaccatccttgtatccctgggatgaatcccacttgatcatggtgaatgacctttttaatgtgttgttgcactcagtttgctaatattgcattgaggatttttgcatctatgttcatcaaggatattggcttgtagttttctttttttattgtgtccttgtctggttttggtatgtcaggtttgtgtgtgtgtgtgtgtgtgtgtgtgtgtgttttaacattagtgactccattttgattctgacaactttcacagtagttagtgaaataataatctaagatagataatttttttcattatttttattttttcttttgagacagggtctcattctgtcacctaggctggagtgcagtggtgccatcatggctcgctccagccttgacctcctgggctcaagcaatcctcccatctcagcttctcaagtagctgggactaccgcacatgccactgcacctggttaatttttaatttttttgtagagatggagtctctctatgttgcccaggctgatttcaaactcctgggctcaagcagttctcccgtcttggcctccaaaggtgctagcattacagatgtgagccattgcacccagccaatagatcattttaaatgcatcttcaagaatggttctaaagctttagaaccatataatttgttcaaattgttttttgttgctataaagcctcaaggttgaccaacacttaaaacactatgatacagagtaggagaaaatatttgcaaaagacatatctgataaaggacagctatccaaaatatgcagagtattagaactcaagaataagaaaaggaacaacctggacagacacctcaccaaaaagaaaagacccggacagacacctcaccaaagaagacatgtggacggcaaatatgcatgtgtaaggatcctgaaaatgatatggcattaggaaattgcaaattaaagccacaatgagatactgttacacacttattataatggccaaaatctaaaacactgacaacaaatgctgaagagaatgtgcaacaataggaactttcattcattgctggtgggaatgcaaaatggtacagctactttggaagacagctgggcaatttcttacaaaactaaacatacttttaccatacactccaacaatagtgctctttggtatttactcaaatgagttgaaaacctgtgtctacacaaaaacctgcacactgatatttataacagctttgttcataattgccaaaatttagaagcaatcaagatgtctttctctaggtgaatgggtaaataaactgtggtacatccagaaaacagaatattattcaaaactaaaatgaaatgaactatcaagccatgaaaagacatggggaaaacttaaatgcatattgctaagtgaaagaagccaatcttaaaaggctatatactgtatgattctaactatatgacattctgcaaaacacagaactatagaggtagtaaaaagaacagtacttgccaggggttaaggaggagtgagagataagtagatggaacacagaggattttttagaacagtgaaactattgtttatgatactataattgtggatacatgtcattatacatttgtccaaagccatagaatatacaacatcaagaatgaactctaatgtaagctatggatttggggtcataaatgtgtataaatgtaggtttgttgattgtaacaaatgtaccactctcttgtatgaggctgatagtcggggaggctatgtgtgtgtgtcagggggtgcagagtatagatgggaacaccctctactttgtactcaattttgctgtgaacctaaaacttctctgaaagataaattttattttgaaaaacactatgggccgggcgcggtggctcacgcctgtaatcccagcactttgggaggccgaggcgggcggatcgcgaggtcaggagatcgagaccatcctggctaacacagtgaaaccccgtctctactaaaaatacaaaaaattagccgggcgtggtagcgggcgcctgtattcccagctactcgggaggctgaggcaggaaaatggcgtgaacccgggaggcggagcttgcagtgagccgagatcgcgccactgcactccagcctgggcgacagagcgagactccgtctcaaaaaaaaaaaaaaaaaaaaaaaaaaaaaaaaaaaaagaatgaactctaatgtaagctatggatttggggtcataaatgtgtataaatgtaggtttgttgattgtaacaaatgtaccactctcttgtatgaggctgatagtcggggaggctatgtgtgtgtgtcagggggtgcagagtatagatgggaacaccctctactttgtactcaattttgctgtgaacctaaaacttctctgaaagataaattttattttgaaaaacactatgatacactaaaacttcttttgtccttatttggtaatacttagaaatataattttattaagattatatttaaaagtagagtcaaaagatatgcatgttttagtgaaatatcttctattgttattactatcatcatagttattattatttgacttagaaatcctcagtagacattatgaaattagagatcagtaatgttctagttgaaaaagacatatacttgataaaattgcttcttattcttttggcgttactgtggttaagagtcttgtgctgtaatgatctcagttaaaaatagtaaaaagaatctcttgaatattgtggtggactctgcacagttcatgcaacaagaggcatggttacctgcccatatagctttgtttgtatcagccagttgaaatgtcaacatggttccttatccactgaataatttcacaaccctcctcttaatttggttgctttggacacattctatcctggaaacaaaatctaggcttcataatacattcggaaataatagattcatgttctttttttccagctggtactggtagagtttacacatttactcctgcaccataggaacagctgcttaaaaagctgaagtgtgtatttgattccattacattggcacaatagaaagtcatgtaaaagagggagactctctcagcttctccatatttggaaaattaattcttttaagtgctttaaaaaaaatctctacaggtggtcagactctatgaacttaggaccagaaatgacctcatcaccttcagctggtctaaagttgtctttggctgctgcacacttcacaaaatcttgttaattatgattgtttttcctagttataagtccttctggatacatttttatagcatttatttttatcgcttacataactacataaaatattttcattggtgtcaaaatgtcatgttattgccaaatagattccatttcaatttctagaaattattggaaagttaatacccacattttaatggcacccttgctgtggtattaaatcatgttttattgaaattcacaagaatcaaaattacgctgcgtttatccagaataaagcactagaacagttactttttggccgtcttgcccattaatttctatgcttgcactttctctttagacaaacaatgaatgaaatttagtgtctttctagaattgaattctcatgaaagtgattgtcatatacacactcatcatctacttctcttttcagctcagtgatatttagttcaagaattggtaggtgaatcttttccctggcttataaaacttcaccctatttatttctatttcaagaaaagtaaaaatattttaaaaagtaaaattaggcaagaaagtcatcttgctagctaggcatttggtttctccttagaggtgttatttaagaaaactcagtcccctagacatcatttcaagaacataattgtttagctgcaaagctacagttttgggtagaaaattccctttgagggttgcacattgaacccatatttagagaacctgagaaatgagctttcagcagcaatcccatttactcttctccccacagcctggggcatctggaagaagccaccaggaaagctggaggatgactaaagggctgagtttgatccagtttgccagattaggtccatcgccctgaggcccttttttgcctaggtcctgcatattccatgctatagactgaattacgtccctgtaaaattcgtattttgaagccttaacccccaatgtcacagtatttggagatggggtctttgggacataattaagtttagatgaggtcatgaggccatgggattaatactcttaaaagaagtggcatcagagagcttgctgtgtctctttctgccactatgaggacacagtgagaaggcagacatctgcaagccagaaagagggatctagctccaaccatgctggtgcatgaagacttccagcctccataactgtggaaataaatgtctgtcgttaagccactcagtctatggtattttgttattgcagcatgagctgaggaatagaaatggtccccaacctaacaatggttccacttaatgcttttttgactttatgatggtgcaaaagtgaaaagcattcagtagaaattgtaattggagcatccatacagtcatcctggtttttactttcagtatagtattcaaaaaattacatgagatattccacactttataaaataggctttgttgttagatgatgttgcccatctgtaggctaatgtaagtattctgagcatgtttcaagaaggttaggctggctgggcgcggtggctcacgcctgtaatcccagcactttgggaggccgaggcgggtggatcacaaggtcaggggatcgagaccatcttggctaacacggtgaaaccccgtctctactaaaaatacaaaaaattagccgggcacggtggtgggcgcctgtagtcccagctactcgggaggctgaggcaggagaatggcgtgaacctgggaggcggagcttgcagtgagccgagattgtgtgccactgcactccagcctgggctaaagagcgggactccgtctcaaaaaaaaaaagaagaaaaaaaaaagaaggttaggctaagctacaatattctgtagattcggtgtattaaatgcattttaaacttaagatattttccatttatgattagtttattgtgacataaccccatcacaagtcaaggtgtatctgtccatcccccaaggacaagagacttggagcctgagcacacagggatggtgcaaactcagatgttggtccagacagttcaggaacacatgttttaaaattggaattgttgcctcaattttctctttcagtgtgtaaatggaacctccaaataagattaaattgaagagaaagcattaaagggcagtattccagtggaatccatgaacagtttgtaagtaaaattacttgtttgtttgcactgatttgctaaggaaggaaaattttaaaagtagtcgttgttcttaagaaagttaaatttatagtttaagttatggtatattttatactgggcactgtgccttcctcataatattcttattaaatatttgttgatttaagatgttttttacttcatcacatgtatttagcagagtaaattcttataaaagaattttatcacattcttgtgacaaagtatactccatgctaaatgtggtactaattacttgagtgtgaaggtgaagatttttcctggcaaatttggaacagcagcttaaaaaataggtaatacacagctgaagagtctttctttccagattcaactcatatacctactatcttgactttctctaagcctatatatttaaattctagaaaccaccacattcacttattaaacacaaatgccaagcatgcatctaatatttattacattacatttttatttttatgaaatactgattgaaacaaatagtcacccaggacaggggtcccgaacccctggaccacggactggtattagtctgtggcctgttcgtaactgggctgcacagcaggaggtgagtggcaggtaaatgagcattactgcctgatctccgcctcctgtgagatcagcggcggtgttagattctcataagagcacaaatcctatggtgaactgcgcatgtgagggatgtaggcggtgtgcttcttatgagattttaattaatgcctgatgatttgaggtggaacagttttatcctgaaactatcccctctgcctcctggccatggaaaaattgtctttcacgaaactggtccttggtgctaaaaaggctggggaccactgatctagggcatagctagtttttgccatagctatgtcataactagatgtgttgtgataaaatctcacctgtagatctgagttgagcatatcagcctatttcactgtggtagacaattctgtctgccgtggtcctccaaagatattcacatcctaatccccagaacctgtgaatatgatgctttacatggcaaaagggagtttgcacacatgattaagttaaggatcttgatgtggggagactgtcttggattaaccaggtgggttcaatgtcatcagaaggctcctcctatgaggaaggaagagagtcagaaataagagtaggatatatgatgttcaagcagaggagagagaaagagagagagagatttgaagatgatatgctgctggttttgttttgaagatggacgaaggggccctgagccaaggaaagcaggccacctctagaagctggaaaaggcaaggaaatgaaatcccccaagagcctccagaaggaacacaaccatgccaacctgttttagacttctgatctcctgaactgtaaaataataaatatgtgttgttttaaggcaataaatttgtgataatctgttatagtagcaataggagaagaatacagcaaatcaacactgattttattttcttaacatggtgcaactaataccaacttaaaagcaatttaaactttacacactagttgtcaaattctctaaagagacaaacctaaatgaatatgagactaatttaaccttctgacatctatgggcacactgaagactgggagaactggtagtgttcacgtggtgtttgtccaaccctttaacccagcaccctctagacctgcactgtccaccccacctggagctactgtgccctggaaatgtatctagaatgtaatgggatgtgcaggaagtctaagatacactgtggattttgtaaagaagagtgcaaaataccttgataatttttgttttgtttcgtttttgagacaatcttgttctgtcatccaggctggagtgcagtgacacaatgtcagctcactgcaacctcctcctgggtttaagtaattctcctgcctcagtctcccaaaagtagctgggactacaggcacgcgccaccatgcctggctaatttttgtgtttttagtagagacagggtttcactatgttgcccaggctgatacaaactcctgacctcaagtgatccacctgcctcagcctcccaaagtgctggaattacaggtgtgagccactgcacctggcaataattttaaaatattgatcacatgttgaaatgatactagtttggatatattgggttaaataaaatatattactaattttaattttaacttgttttaactttatgaatgctgttacaggaaagcttaaattacatatataagtcatattttatttctattggacagttgctctaaacagatgaattctatgtaatgatgtaattaatataatgtaggttacttatgtcaattgatagattattgattaatcattagactgctgcagttgagagagttaatggattttatatatatttatgcagtttaaaactagcatctccattttttgtagtcatattttgccagagtctgacctctacaaatctcaaattaaattgtggtgagttaagtcagactttgaaaaaaatatctggacgaatgcctaaggaatagtgagaaatcctgttggcagctcaaaggtggcatttttggatggcgggaggtagggttttctgtggtgggtgaaagtgacctttgtggatgttttgttgcttttttttttaaaggaaggaaaagtagtccatacctatgaagacattgttactataaaaaccttaatttaggtaattttttttggtaaaatgaaaaacatattttttccttttagtgtaggaatacttacagggaagacacagaattaaaaagaggaggcagcttgctgggatgaaaatcacccagttgaagacattaggaaagacctaaaccttgtggcttcattaacacatgtgtgtctggttaggaatagaatatgctaccaatagaatgattaggttagagcttcctagaccattggcaaactaattttttttggggggggaacaaatttattttgatttttctgaaaatatcaggaactatgaaaaacaaggttgatatttggctgtaccaaaagcaaagtacaagtaaaaataacatttgaaaaccatgtttaaccttagagaaacatgttttaaaatacaaagtttaacattcttttctctacagatttaaacaagttttctaaaccacaagactgcaggtttttttttttaactgacataattttttagaagaaaaaactaaaggggaataaaaagcacttacctcctaccctggaatctcattatttataaaataacatgctcaaatatcagtgaaaataaacagttgataaacctgaaaaatcttttaatgagttcaggttacaaccgaacgcaggattttgtagctgggaaagaacagcttgtataacaaccaagccttaccaaatacaaatagagataaaaggcaattaaaagcaaattataaaatcaaaatatttccgtagagtggcagccttcacaaagtaaaaacaacttcgttccacagaattgtatgttctgtaggcatatggtcaattcttttccgagtccttttgtcttgcactatcaaaataaaagaatctttgtcttggagcaagtctgctaaagaaggcaccaaaattctatcctccctattcccctaaataatattaataaacctcttatcaatcctttcaaggtaacttcaacgccattaagaattaatattctaaatatgtaaagctatagaaggaaggtcctgcctattctctttgcccctctcaaatcattctagtctggtttaccaaacagaaccactagctaagaggatagaaatatgttcccgtgttcactagccattaaataaacatagccacttgtgcaggaagcctaacgtttttactacttcctaactttttaaaacttaaggataagcccatttccacaagctaactttacagctccttaatattcttaatctggatggtttactttgcagactttgttggtgtctgcctttttcaattattttacccaaaaataggccttgaaaaaactttcaaattcaggaaacccctgcagggaaccctcatggtgtgtgagtgtgagcactaagttgaagaatactcttatttcacagaaatgtaggactgtcagactagggctgagttcattctcttccttcagagacaaaatttcaagctgagcagatttggagaaagggttccccatacagtcatatactagtgctgggaaaaggagagaaaatactacttaattgtgttttgtggttcctccaggtgggttatagcaagatttgagagttgtactcttcattttcaagtccaagtggctgcagaaacatttcaataattcccctggcaaggtagcaaatcagtttcctttttgatctaagactcttgtcactttaagaaaaaaaattttctccaggacctttcagagacttgttcatttgttcatgtgatgaaaatcgtctgctaaatcggctagtttctgtagctatttttcatttccaaagcattcagcaaaagctggctattttcttgtaagtactctggcaattcacctttcaactcaaaagtcctgtagagaactcttcctctgaaaagccactggatatctgtatggtacaggaggtttatgcgctgtttgtccaggtttttgttttgggtgtttttatttttttaacatttttgcataaatgggtctttgatacaggtaaccagttttgtagcattattcagaatgtcattgtatcttcaagtttttgatatcagcatctctgtgaagaaagcagtgtgctatagcgtcaacatcaggatttctttcttcttttttttaatgatgcaaaatgacttatggagacaaccactgatggggcaccaggagtgtagataacagacctctggttatcagatatgatatcacaacattgtatattggcctttgttttggcaggctcctagcaatagaaaaagttttctttgaatttcatcacttacaaatcttacaaatgctacagcatgacaaatattagtgaaacccgttgactcatcatcctggatagagaagctgctgcttttctctttttttgagacggagtcttgctctgtcatcaggctggagcacagtggcgtatctcagctcactgcaacctccgcctcctgggttcaagcagttctcctgcctcagcctcccgagtaggtgcgactacaggcacacgccaccacgcccagctaatttttgtatttttagtagagacagggtttcaccatgttggccaggatggtctccatctcttgaccttgtgatcctcctgcctcggcctcccaaattgctgggattacaggcgtgagccactgcacccggcctgaagttgctgctcttcagttaatgacacaaaacctttgtagcatcgtatgagatatcatcagtaaatcaacttactgagaataaagtcttttcaattttgtactgcatcctgccccagcattttaatgttattagattctcatcaactatgcatatttttctttcctgagataagttctgctagtaaataatttgctttcaaaacattttgactaaacgtgatttttgaacagaagccgtactgttttgatggtccaaaagccaactgaagataatgaatatcctttcttgtcaagtgcctgtgatttatagttacaatttttagttttgtaagttgcatgccacagacaatgcacagtgggacaggacagcttggactgagtccatattaaacccttaaggagcagctttcattataaagacagaatctctttgtgtcccttgttgtactagaatactgaagtatactcagaagaccaaaattcttcatcaccaaccttttcagaaatgtctgtagctctgtgcctaaaatgcctctcttctttctcacatcttaccttccaaaattgcagcactgaactgtcagctttgttacacacaaatgttaatataatataaaaacaggccaggcgtggtggctcacgcctgtaatcccagcactttgggaggccgaggcaggtggatcacgaggtcagatcgagaccatcctagccaacacggtgaaaccccgtctctactaaaaaaaaaaagcaaaaaattagccgggcgcggtggcgggcgcctgtagtcccagctactcgggaggctgaggcaggagaatggcgtgaacccgggaggcggagcttgcagtgagccgagatcgtgccactgcactccagcctgagtgacagagcgagactctgtctcaagaaaaaaaagaaaagaaaagaaaaaatatatatatatatatgtatatatacacacagacataaccaaacaagaaaatcacaaagtacaaaaacttcaccaaacaattcaattctaacctacatgatccacacttttgcaatgtttacaacaaagtggcagggggacagctgagctgtggcatgtaaacctccttccttcaaatgaaaactcccctctgatttcctactttacagtcagttcactacagtaagtcagctggcaccacataagaggagcctgggagaggccaacgtccccctctcctcccatcctcccctctttgcaatagtgtggcacatgggtctgcctctacataataccataagggctgaaagttccctaacaaaatgattaacagggctgtgcaatcattgttcactactgcgagaatagcataatgcagcacacaaataaaaaactgtttttagtcacaatttaaggtggaaccccagcaacatctcatagagacccagttgagaaacccacctccagcacgaaatggcctcctatgacagatcattttcatttgatttggacccttctgtggcttgacttgcaagttcaggtttggctcctccctcatttatcacctgcggattagacgttcttttccgccctagctcttcagtattctctggtacctgctggttatttttcccttctgctgtattgttttgatctgatttgtcagcagcttccagtttaccttccttcccatttctctgctttgaattaagctgtgatggacccttagagctctttatcacctcctggagattgaatttttttttttcctttttttttttcctaatgctctgttgccaggctggagtgcaatggcaccatctcgccatctcagctcactgcaacctccgcctccgggttcaagcgattctcctgcctcagcctcctcctgaagaggtggaactacaggcccacaccaccacctccagctaatttttgtatttttagtggagatggggtttcaccctgttgcccaggatggtcttgatctcttggcctcatgatctgcctgcctccttggcctcccgaagtgctgggattacaggcatgagcctccacgcccagtcggaaactattttctaaactacatgtaatctttcaggacactcaggcaacataatttctactatcaccgtgtactgtggattgctgagagccactttactttctgaattgagggtgcacactattcctgccaattttttgataacttctctattcatgtgactgtgtccgcagttggttcctttcagtgggttcatagtctcactgacttaaagaatgaagacgtggaccttcgcggtaagtgttacagcccttaaaggtggcacagacccaaagagtgagcagcagcaagatttgttgtgaagtgcaaaagaacaaagcttccacagcatgtaagggtaccaagcaggttgccgctgctggttgggggtggccagcttttattcccttatttgtccccgcccatgtcctatttctgccctatcagaatgcccttttctcaatcctccctgtgattggttacttttagaatcctgctgatttgtccattttacagaggctgattggtccattttacagagctctgattggtccattttacaaacctcatgctagctacagagcactgattgatgcatttttacagagtgctgattggtgcattttacaaacctcttgctagctacagagcgctgattggtgcattttacaatccccttataagacagaacagttctccaagtccccactccaccaggaagtccagctggcttcacctctcatgactgctatttcaagatttgtacacaatctgaaatgtccctttgtttggagctttaaaccagggttccaaaaatgtttctgcatattttttcatatcttttaaaaaagctttgcatgtgcctgagatgggtaacattcgtagaataacttgagtcttcttggttttgtactcatcctggagaatatgatgcaccagtttctcaggttctttcccaagtgtcctgatgaaggcgacgttatttgctccactttccactgactggaatcctcttaggctcatctctgtagatgcctcaatgtcaccaacttctttcttcaagacagcctccacatcatcatcttctccctcacttccagagggctgctgatccttgtctgtaaacttttctggcccatacatgtcatcgccatattcgttgagcagggtgtaagcctcctccacacacttggcgctggttcatgttgcaggtgatgaggatgcccgtagcccgggctctggctgactgggcccgccagattcgcagtgccgagctcgcttgaccagcacatactgagccttgcctctgtgcttcccgccgccaggctgaggaggctgctgggcagcagccgccatgatgtgtgcaagctgagaggaaagagaaacgtttctccactgcagttggcgtcctcacctcccggcgaacttctccacggtttacgggtgtgaatagaagaagtatgatggcttcaacatttggcatacatatgcctttttacctgcagaccatgagtagttttgaatcacttcagtgttttttgtcttctcacagagtcttcatggacacatctttctctttccgaagaaacaaatttcttttgaaatcctgttagtgtttcatgaaggcatctagctagtgcagcttcctggaccagagttatgtttgtatgatcaagaaatcttaggaaactaaacaggatccgaaagcaattatgttttgtgtggcgaccaccttagagttcagtgttgaaaaaaacatatatgtatattaggcgtgtgtatatatgtatgcaaagcaaagtgatgtatatttggcaaaagacaaaacatttgccttctgggcactccataccattttgcgaatgctaaatatcacctaggacatgaggctcatggtttgacactcagcatgaaaaaatatatattaagaaaatttaggctgggcgtggtggtttacaactgtaatattagcactttgggagattgagatgggcgaggctagaggcaagcagttcaagaccagcctggccaacatggcgaaaccctgtctctactaaaactgcaaaaatgagctgggtgtggtagtgcatgcctgcaatcccaactacttgggaggctgaggtaggaggattacttgagcccaggagacaaaagggttcagtgagctgagatggtgccactgcactctagcctgggagatagagcaagactttgtctccaaaaaaagaaaagaaaaagaaaaacagaaaatttgcacaaactttataatttcaataagtaaataagtggcataaatgattattagtggaaggatttctctttaaattacttggatcatccctcccccaacccatcaccagttttttactttattttgtaggggctgccacactcatctaggggctgcatctactaattgatgtaagtattgaccacttgcggtgttttaatgaaatagtaacctctgaaaagtttccccacttcctgacaaatccgtgtacacttatcattgtggtataagtgtaccacatgcaccagaatctggtgcatgtgtttatctcaaatccaggactgtttttatgtttacagaccatgcactgcaagtctaagtgttctcaggtaaagctgtcaaggcaggaggctgagtgaggacacaccagctttacctgccttggggcactcctgggattgattggtttccccagagccataaaattttttattattcttctgcatatatcaggccacggaactgtgtggccttctgggacttctgctgcttgtaaaatggcacaacatttttgttggctgaagtgcagggtgagaattgctcatcacccttgcagagcaactggagacctcttttagggtcattggttaacctgcaccagagggcagttaatgagccaatgaaggaaatgctaacattaaattaaatatgtgaagaaggattcctccaggcatcagatgagctagatggggtaggaacattgagagtgaaaatctgggaaataaccaagtgctttgttcttttctaaggcatgcagaactcattactgttgatggaagcaaaaacaacaaggctgagtgccttgactaagtcagaggttagaaaccctctggctcaactttattggccaatcttcattaggtgagcaaagaagcctctaaagagaagaagcttgtttgccctactggaagagcagtcattgcttttataaataatcaataccacatatctttacatagagtttcatcatacttaaaatatttcagcttcttcctggtgtagaagttatagatggattaaaaccaaatgcttaaaattcaccccccagagaatagggaattggtcttagaaaatggtagtctttgagctgagaggtaagttgcatactagatatctcttactggaaagtcctactgaattcttctgacctaaatgagtacgattgagccaattgcagtagcaaaaagaatttcagatggtataatgcagcaattatatataaatcaggccttggaactgacagaccaggtgccaaatccctactaatttcagtgttatttaacagagtagaattacagtatatagtttaacaaaatagttgtacagagctttattcagttcttttggttttaaagaatagagagtcacctgttccaacaattaaaagaattttaatgtatcagtatgatatatatgtatagataaatgcacacacacacacatatatatatatttgagaaagatcatctcttagaaatccaagaacaggatttgtaatagaataatttctaggggaagtgatttggaacccaagacaagtctgggatcctcagaagcagaagtccattaatttcactctgagtgccccatgttaatgtgaagacactatgcatctgttgtcttctctgtgctcccctgtccaccaaagggcttgtgttttctgtatttcacaattcaggctctcgaaacaggcattctggcctgtttgagcacagacttattggccaggtcacattttagcccaactgctagtttatggattggctggtgatgggacagacaggcctttactcctaatccaattaaagatgttcattaagaaggctgcccttcattgaggggaatgggtggacaacttccttttgctagggtgtgactggcataatgaatgatatgcctgacagtccttgagagttggttatgggtaagttagatctgcatgccatcttactttctgattacacttcttcacaatcattggaacacaagtggaaagaagataaagatcccctttatttgagagcaaatcttctgaatatccattcaatgaaactcagataccctctctaggtaagacttaactttgtaacctattcaccacagaaatgtaaacataaaaaaattgtcctatagttaagtgacagagcagagtgaatcttaagcagaagggtcaagtaggcaatgagattttttttgtcagagtcattctttcttttcaaacccagagctatttcatatactagcaaattaaaggcagctgtactttgggaggaagaggatgtgatttagttggcagataaccttaaatcacacctttgccccatagcctatggccttgggtaaataaatgagcttctttgagctttaatctcctcagtgtcaaatgtaactatctgctatggtctgaatgtgttcccccaaattcatgtattgaaaacttaatcccaaatgcaacagtgctgaaaggtgagtccctttgggaggtgtttaggtcatgagggctctgcctttataaatagattaatgccatcaaactaggacttgatggagggagttagtttctcttgaccgtctaacgttccccatataaggacacagcaaaaaagccctgccagacaccaaatgctggtgccttgatcttggattcccagtccctagaactgtgagaaaataaaattctcttctttataaattacccagtttcaggtattttgttgtactagaacaaaacagactaagacactatcgtacaaagtcgttgttctaaacattgtatgaaagaggtgggtatatgatggataattatttcataagtacttaaaaaaacaatggaagggacacctaagaactctcattttacagatgtgggaactggggcttgagaattatttccgttgtttaagttcagtcagcttacttagtcaaaactagaactcagatctcttgacttcctaggccagtgttttttcaagctacctctaagttattctacaattctaaaaacttgctcttaagactatggatgtaggtaaagttatagcttccagttgcctacaatgaacaagggaaactatttttattattaggctgaatttatttatttatttatttattttttgagatggagtctcactctgtcgcccaggctagagagcagtggtgcgatctcagctcactgcaacctcagcctcctgggttcaagctattctcctgtctcagcctcctgggtagctgggactataggcatgtgccacaacacctggctaatttttttttttttaaactagaggcagggtttcactatgttagtcaggctggtctcaaactcctgacctcaagtgatccacccgtcttggcctcccaaagtgctgggattgcaggcgtgaaccaccgtgcctggccaaagttctttttttttttaaaaaaagagaatatatctggtccttatttctgtgaagactgaataactgttaatagcacaaattactaactgtcctagaggaatgtgtttttgtttgttgttgttgttgttgagacgaagtttcgctcttgttgcccaggctggagtgcaatggtgcaatcttggctcaccacaactcctgcctcccaggttcaagcgattctcctgcctcagcctcccgagtaggtgggattacagggatgtgccaccaagcctggctaattttgtatttttagtagagatggtgtttctccatgttggtcaggctggtcttgaactctcgacctcaggtgatccgcccacctcagcctcctgaagtgctgggattacaggtgtgagccaccatgcctggcatttgaggaatgtgttttaatagtaacccaagtcttaaagaagtgaaactctttagccaggcacccctgagcctccctggcctcccgcagtcaccctggccacatggctaacctcctgtagctctaagatcaaggagccaatccaaggcttccaactggcaatcaagctccagactgaaaggccatgaaacacaagtaacctgagctcacctggctgagcatcatagtccagaaatatttttcatgccatgcacttctccgccacgcgagcaaagtgtggcgcggtgcagtggaaattttgtgtaatccatcctattttaaattaccaaggagttgaattttatgaaatattaaaggactagattctagaagaccttcatagaatacagatggtttgttcacataatttttttctttgtgcaggagtgcaagattttccaagcacgtcttccttcttccacttagaattccttcacagactcttgttgtctattttgtgtaaagcaccataggaaatacaaaatgatattttatatgctgtctttccccatagagcttgttttctggttgacatatgaatggagactccatgaggtctggaactttgtctgttttacccactgttaggatctagtgcctagaacagcatcttgcagagaaaaggcacccaaggaacatttgtggaatgcatagatgaacattagtcataaccaacaaacatttatatgtctaatatttattccccccacctcattttttctttagagatggggtcttgctgtgttgctcaggttggactcgaactcctgggctaagctgatcttcccgccttggccttccaagtaagtgggattacaggcttgtgccacagtggttgactgtgccccctagtgttttttattttttatttttttagacagagcctcgctctgttgcccaggctggagtgcagtggtgcgaccacagctcactgcaacctccgcctcccaggttcaagtgattctcctgcctcagccacctgagtaactgggattacaagtgtgcaccaccacacccagataatttttgtatttttagtagagatggggtttcaccatattggccaggctggtcttgaactcctgacctcaagtgatctgctcacctcagcctcccatagtgctgagattacaggtgtgagccaccacgcccaacctgccccctagtattttaagtacagttgctgcctcatttgattctcacaattccatgaggtaggaactattaatatttccattttgaagatggggaaactgaggcttagaaagatttaagtaacttttccagtgttccccagtggtgatcctgggatttgtagcaaagtcagctggccctgaaatctgttctcttgaccactttgttctgttgcctctgcatactaagctgtcttctccctcagagtaaaatacactcttttcctgtttttataacccaaatcaagaggtgcttataatggcctcacatctgtgatataaacaacaacgggctggaaagttttggagagtctgaaccagatgtgggactaacgctgcccttgagggataggaaggatttgaacaggtgagaggtagagctcctctcacttagacttctgggagaagatggcttgaaaatcctctccataatattgttatattataatctcataaaatattatagttattgtcgttcatctttaacccagcttcatcatcttaaacagcttgtgagggtgagcatacagacttgttcatatttctacacaagctcagcacatagcatggcaccttctctttgatttgattgaaattgaattatcattgatggtaagctggatgggcttgggaaagtattcttgccaaaccttgaattccgataagcttttctttttcatgtttttctccagcccttcctctgcttttgaagaagtcctaaagaaaaaaagaacacaactcttcatgtgaaatcatttttgacgtctttggagatttctctaggttctggcccaagcctgactgttgttctgttccacctacattcttcctacacttgagggatttgaaaaaatgtacttaatgatttggacttattttaattttctctaacttatttattttctctgaggttaagaacattttgtaaattcactaaccaaagatattttgcacacgatgaaagagcttttaaaaaacattggatcggagttagcatatttccccaaggaaaggaaatacacaaactagtcacatgattgattgaaaaaaacaaagcaagagaactaaaatatcctcctgaactagttcctaaggtacactctttttccattctgacacaacaactagtctgcactgtttgttttttgaagtgaaactttggtgggaaaatttataaccaaaatttctgtatatttcacactaacattctttctcttgccagacattttgctgtgaactcaggcatttatccccatatgttttccagcctgttcaggtgttcatctctcttgttctcagtaaatactaaattttcaagtcaagcttctggaaaggtagtttggtcaccatgtttttgtagagagtgattataatgcacattttctttcatttgttcataataatgaacacaaacccctggtgtgaatttcactttattagtagagtctttacagtctgaggatctgatattagtaaagaagtcaattttgaaaatgttggctatctgaagaagagtgacaaatcatgaatgacctaattgatattgacaaagctattgaaattgttaaactgacagaccaaaattgacagatagaccaaaattgataaattgataaacatatttttgagcagtgactatatatatgcaaagccaaacttccatttgaaatttgctctctactaaacagaagcaaagatgtaggggcttggagtaggcacctagttagcgatatcattccttattcccgccagtaaatcactgacaagaataaactcttcccatccgtttcctctttctaacttactgtaactgggcagtactgtaactggactgatctcacacccagatcagtcaatttttataactgacattttctaatgcattcagctccattaccagtgccaccaactattacttctgatttactttggaattaattcaaacttttttctccagatttcatcatgctaagaaacacttctcatgcctgcaacacctagtatctatttccgtaagtcaaatttaaaaatattcatagacttatctttgccccaatgtcagtagctgtcagggactcaggagactctaaagattcatgaataatagtagtagaagtagcaatcgtaatagtaaaagtagtaaaaatagcagaaattatattatttactggatgctttctacccaggcactgtgctaagcactttattttcagttacgatttcattttacagaagaagaaaccaaggctcagagaggtgaaataaccttatacagtccaagtggtagagccagaaaattcattgttttttaaaagtttaatagaactcaccaatgaaaccatctgggtgggctttttttgagaggggaagtttttgactataatttcaatttcccacttttagttgaatagtttgaaattttttctctgggcttatttatttttgagatggagtctcacatggttgcccaggctgtagtgcagtggtgtgatcttggctaactgcaacctccacctaccggggtcgggcgattctcctgcctctttttgtatttttagtagaggcagagttttgtcgtgttgaccaggctggtcgtgaactcctgaccttaggtgatccactggcctcttcctcccaaagtgctggaattacaggcgtgagccactatgcctggccatatttatttgcttctattgagttcttatattttcaatgcccttatttcccctgaactaaataatttagtgggctttatgtcactttgttctctttcccactgctatctcacatcttttgcttatactgataggcttatctttgccccaatgtcagtagctgtaggggcatatattatctttatttggtaagaaactcactggtgagtcctactaaacttttaagaaacagtgaattttctggctctaccacttggacggtgtaaggttatttcacctctctgagccttggtttctccttctgtcaaatgaaattgtaactgaaaataaagacaatatatgcccctatagctactgccgctataatataaacggacatgtattatctttttctttgtcttggtcctagccctttaaagatgactttcacattgtttgaaatgtctatgcccttacttatctatttttgtctgcttgttccatcagttacagagagaggtgtgttgaagtctcccgctatgattgtggataattctattttttttagctgtttcaatttttgcatcatagaattcaaacttatgctagtaggtgaccaaatttagaataattatatcttcctggtgaactgaatttttatcattgtggaaatgttcctttttatctttagtaaagctttttacctgaacacctattttgtctgacattagtataggtatagtaggtgtctgagtcagtttgctctgctataacaaaggaccatagactgagtggcctctaagcaacagaaatttactctttatagttctggaggctggaagtctgagttcagggtgccagcatgattgggttggagtgagggctctcttccaggttacaggctaccatcttcccattgtatcctcacatgacagaaagagagctggagagctctcttggatccctttataaaggcatgcattctattcatgaggattccaccttgatgtgctaaattacctacgaaagatcccacctcctaataccatcacattgggggctaggatttcaacgtatgaattttgcatggacaaattcagtccataacactaggtttttttggatttatatttagcatattttagctttttccatcattttactttcagtctttaaaaaaattaagttgtgtgttatgaactgaatgtatccctccaaaattcatacccagaagccctaacaccttcaatgtgtctatatttggagatgggcctctaaggaagtaattaagcttaaatgagatcataaccacttacctcctaaaaggtaagagccaaaataaatgaccatttgatctcaatttctatttttttcagaatattctacccctaaatgcaaataaatttacacagagcccattaattttatatgaagtaggtgttattcttattttgataattacacaaagataaatgggagctagaagcaattttcaaaacaaaataagcaggagggaagacagttctgttttcccagcctctgttcctggtctctcatttctggctcaaggactaccacactctggagccctgagaatcagctttctggagttttggggtatgctgcgtgctcctgacaagctaattgcatggacaaggaaaatgggataaaagttgggaaaatggggattggctaagggaataaataatagataaaagtgataaaggagagataaaggaaggcagtatgatgatgagaaagagatcagaaagtagtattttgtggaaagaaacatgtgatgaccccacataaagtaggcagtatgctccattaaaaacaccatcatattaaattctgttaagagggcatttcaggaatatcaggttctagaatgatgagaggtacaaatgctttaactcgtttgctttattggttaaattttatttattatcttatttaatattttaaatggtatacgatgtgatattttggtatatgtatacattgtgaaattattgaatcgaacatatctgtcacttcacagttattttatgtgtgtggtgagaacacttatctactgtcttagcaagtttcaagtctacaatacatcatgactgactgtaatcaccatgctgttgaatagatatccagaacttactcatactatctgaatgaaactttgtaccctttgtttttgttttttggggggtttttttgttttgttttgttttttgagacagggtcttgctctgttgcccagtgttgcccaggctggagtacagtggcaccgtcacagctcactgaagccccgacctcctgtgctcaatcaatccgcttgcttcagcttcccgagtaaacggtactacaggcacgcatcaccatgttgggctaatttttaatattttttgtagagataaggtctcactgtgttgcccagactgatcttgaacttctgagttgaagcgatcctcctgcctcagcctctcaatgtgctggaattacaggcgtgagctaccatgcctggccctttgacttggtttgatctttaagggcatgagttatcagataagaatctacctcttcctagctctgtggccttaaccttttttttttttttgacaggatcttactcttacccaggctgaagtgcagtggcttgatcatagctcaccccagccttgaactcctgggctcaggcatcctcacacctcagcctccagagtagctgggactatagacaagccactgccatgtccagctaatttaaaaattttttgtagagacaaagcctcactatgttgcccaagctggtctcaaattcctggacttgggcgatcctctgcctcagccttccaaaatgctggaattacaggtgagccaccatgcccagcccttaacgtctttaaactgtcattttctcatttgttgaatgaatatcacaatagtacccacctcatagggtagttctggggattaaataaaatatttagttaaaatcttggcacattgtaagcactccataagtgttacctacttttggtattatcattgttgttataacgattattattattggcgtataggttggcaatagaaaattataaccctcatgcttaattcagccctaattagaaattataactgaatctagcagctgcgagcggcagcagtttaatgaagaacgagttgtcataaaatttaaattatatctatccatagctagtttctatttgtaattgagttttttccaagtttgtttgttacaaatggaaaagagctttgctgtaatcataagagatttgatttaacagttctaaagcccgctgacctgattgtggaggttctgactttaaatatgtaaagcagcctgtgtgcttgccatccttgtttgttgcttaaaaaaaattatattttcttattatgttggttaaggaaaattatatttgttagaatatgtttgttgtagaaattaaacttacccatcaagccttatgctgtacaccccagcactccaaccattaacttgctatccgcagtttttgatttgcatctgtgacttcactagaatcttagtggcctttgtctctaccagtgtatttgtaataaactaaattatcctcagagacttaattggtaacataagtgcaagactttgcctctgaaaatacagcttttagaaataacattatgcctttataaggtgtattccaaggaagacaaatatgtaaacattcttcatgtcatcagagtttatagtatttttctggagtggaaggttattattcctattttcccaaaaagtaccagggggtcagtgacttcttccaggtcaatagcttctgtctggaattaccaagaccataacttgaatcacctattgcaaattccctttctagtccataacattgttgtgcaaaattgaaatacttatgtgacaccaaaacaaaaacgaaaaccaaacaaacccaaaaaccaaaatcccaaaaccccccaaaaaactaacacaaaaaactaaactaaaaaacctaataaatcctaagtcaggtggaaacacttcaaatagtttctggatgtgagagcttctcagaagctaataaagattcctggctctattggatggaatgctaagaagctattttggttggattgggaacatttattaatgtcttcatgtgagcagcagtaaaagtgtactacctattaaaagttacctatttgcttattttgcccaccattttcagatatgagcttctgacatttcaacaaaactaatgaccagcttgttttgggtaaccagtttcttgcagttgattattatcccccagaaatccctctgtgccaagtcttgtagccaaaacagttatttaacccaagtacagtcatgtgccgaataatgatgtttcagccaacaatgaccgcatttaagacagtggtcccataagattataacagaacataaacagaaacctgatatgtaacacttgatattggcactgcagattaagcaggggaaatgaccgataattcagttaaggttctgagacatttggttttccatatgaaaaatatgtataaattaaatatatatgtatacatataccatcaatgtttgtgtaagtatactctgatatttgcacaatgacaaaatggtctaatgtcacatttctcagaacatatctccatcattaagcaacatatgccaggaataattatgaataggtataataactgcaaaaagtcatgtaaaatagatggaactgccagtgctgaacaaatgaagaggataaatgaatggtttctatgtaaaaggtaaatgaatgtcagtaagaaatagcactctcatgcttccatttgccagaagtatcacctttggttggttgtgggtaatgtcaattattgaaataattaagtgaatatggaatccagagactaaaatactgagcgatcaatcagtgtgtatgacaaacccttctgtgtatagaaacatagattctatgggaggtgaaggcatgtctgaggcacagctatggtttcaaaagactttatagtttgatttataaagcaatatttgatacagaaataccagaactttagagctggaataaaatagaggaagtttctgtttttgttttgttttttgacatggagtcgtctcactctgtcacccaggctggatggagtgcagtggcgtgaactcggctcactgcaacctctgagttcaaatgattctcctgccttagccacacgagtagctggaattataggggtgtgccaccatgcggggcttttattctttgtatttttagtagagatggggtttcactatgttggtcaggctggtcttgcactcctgacctcaagtgatcccccacctaggcctaccaaagtagggattacaggcatgaactatcgcgcctggcctaaaataaaaagaaattgtaaaactagaagagaacttagagatcacctagcccgagaaattgtaaaactagaagagaacttagagatcacctagcccgagaaattgtaaaactagaagagaacttagagatcacctagcctaatactcatggttaaagaggtaatttagtgagaacttaaaatgcaagctataattttagcttatatcacaggcccattccttctcttatatattttttattttccgccttcatattgagcatgtgccagttcattgatgttaccacttctcaagctaaaagtatcatctgcatgtcacccagtgatggcaatggacccggtcacagtgattcaagggtccccaaaaagggtgctgtccttgtccattgatgactgaggaaggggtgcttcttttctgcctattctgacaccatattatctgtggtggtaccaaagctactggacactcctgatggcaagaggtgtaaacccaaatgcagatgaatgaaggaagaaaaaagacaatcaaagctgtgctgtaaaggagacagacagcccccaaccccctgccctgaaaaggagagctatattgtcagccacccgaaaaaaggcatgaccagtggacttcaggatcaatgtggtcagatgtctttttttttttttaagagatggaatcttgctgtattgccccggttggagtgcagtggctattcacaggcactattatagcacactatagccttgatctcctggtctcaagttgccctcctgccttaacctcctgggtagctggaactacaggcacatgccaccacacccgaccagaatttttttttttaacagagtctcaccttgttgcccaggctagagtgcagcttgttttaagtgttctatagctccattagtatgaaatatctgtgtgtaaattgataacgacaaagctattttgattgacaaagtatcagactttggataaaatcataaattatatagatatcgcaatcaatttcaaattcattttggcatcataactttcttaagttagaaagaacaccatatttagcatataatctatacatgcattacctgcattgtggggattttaagcatgtccatacattctttgacacctctctgtccaaaatgtgaagtctacttctctagcacctgagtgtgagatagacttagtggttcatttccaaggaatagagtatggaagggagaaaacaataaccacatgaagtacatgtagacatttatttcaaaaaataaaaacaaaatgacaaaaaacaaaaaattatgaatataattgaaaattaatctcacttatgaatatacagaacaagaaaaattatagtttatttgtaaatgaagattcaaaatttgaaaaataaaatattttaaatctacaagtatattattagtaatactactgatcatgaccaatttgggtttatcccagaatgcaagggtggttcaaaattatgtaatccaccgtaatagagaggaggggaggggggaaacacttgccatcttaatagaagtaggaaaagcattttataaaactcatcatccactcaggacttaaaaatataagcaaatagaaacttcctaacctaatatattggaagtagctcaaagctggggtacatcacatttaatgacttaaaatattccattttaaagtcaatcaaaagacaaaggtaactgcttactaagaagtcttcccagctaagacaagaaaacaaaataagatgtgaaatttataggcactgtcttcaaaactactgtcaagcagactatgacaaagctcatgttatgcaggcatgagagggagtacgtattgggataaggggatgttaaatgaagggaagtgctttccaaaaatgtaactacttaattataatcttgtgacaaacagctacaaaaccacttttaataatacattctttctgtgatagaaaatgtaatcttttcactttgtaaaagctgtcagttctattactagggaagaattaggctttgattacatacaatttctatttcatttctcccttttttccagcagtggctagattcctagcaacagagtctctggaagatctcacccaaggagtaaggcagttttttcaacatttctagcattaggacttggttggctcacctgcaagacagtgtgagattctattcatgatagattccctaacaccaaatctaaagttgagagatatttttaaatttctataagatagtcaataaagatctgctggtgtgtttaactctggtctgggaacctgctaaactttcacttaccatatttgccagaagagtatcttcaaactttatcacctacatacctctaaataaaatttaagaatgtacactttcatgtatttttaagttgataactaacatttatcatcataaatttaagtaagtgcaaataagataatttcaagtggcatactgtaaatatttacattttcaaaaataaaaacttttgtcattcttttaaatgtatctaatagaatctaagtaccatagcaatttgattcccaccattatcaacataatacataaacaagctcttcaatagtgagacattaaacatcattcactggatctttgtttatattttgctttcctcacagaattatagtatattttactgcttaaaatatttatctcctaaggtacttctctgaaacgaatataaattgaaatttaaaaaatttcctataactaaaaggctataagtattaaaaataacttttttctaaattattacagtaactattagaatgcagtagataatatcacaaacatgaatatttttacacacaagtattacacataaaacattaaaaatcttactggaaattcatctgagaatcaagaccaatttgtagtgttttttttagttcatctttccgtgggtatatatgatttataactagcatgacatagcagtcaacataaattacattcccatttttcctatctatagatgagatcatttttaatgtaaaacaaatagatgagaatgtagttttgttccgtttttgttttaacttttaattttcatgggtacatgggtgtatatatttatggggtacatgagatttttgatacaggcaagcagtgtgtaataatcatatcatgtaaaatggggtagccatccccacaagcatttatcctttgtgttacaaacaatacaattatattcctctagttattctaacttgtaaattaaattattattgactatagtcaccttgttgtgctatcaaatactaggtattattcattctatttttttgtacctattaaccatccccacctccaacccccaccccaccccctgtgtcattacccttctcagtctctggtaaccatccttctactccctatgtccatgagttcaattgttttgatttttagatcccacaaataagtgagaacatgcaatgtttgccttcctatgcctggcttaagtcacttagcgtaataacgtccagttccatccatgttgttgcaaatgacagaatctcattcttttttatggctgaatagcactccactatgtagtacattttctttatccagagaatggagatttgtaataattcaattctttgtcactcagtgccactgcatccatcaatttttttagtaatacgtcaaaaatgaaataaattttaatgatttaatggctgacagcctgcctaggcttttgtttaattttattgaaagcaaataactgaaaaccagtgagttgcaaaaaagggttagccattattggagtctctttctcaacacattttcaaatgacctgtatagactggaagggttttttgtttgtttgttttgcttttcccaccttgacaatggtgaaactgagaaagatgggtgaaaattatgcctttcttttaaaaaaggacatatgtgaaaggggcaggtgggaaaagagaaccagtctgagacaggtatataaatgggaagatcaaattttggaaagagtatcgaggaagtggaggaaatgaaaatggattaaaattctccttgcacaagtacctcttgaaatgtcttggtgtgcactattgtgctaacctctcttttagatataagggtacatactgcatctaggatttaagaataaatgtgtatcaattagtatttctgctaattaattaaggtgcattcacttgtgtatattggatgaagttaaactgatgaacttatctggagagtggaggggtgtacagtgaagtgaaaggcaatcgttacttagtcaggaagcccttttaaagggtgtcctagtcttaataaagacaatggtgacgatttggccaaagaaaaactttagcccacggattgacttgtttatgttttcttaccctgcaataaattgagtattataatgtctcttaaggtgagtctcttttgtgaattaaaatagtcataaagtcagccaaagtatcgaaggttaaaaaaaaaaaaaagttaaattcaaactaaagtatacagtgaaagtttctgaaccaagccagatggtatcctggtttgaagagatcagatagaaagggcatgtgcgatccacagctgacttaaccagtgctttcacatcccagcctctgtgtagctaagcttgagttggtgactgcatataaaagcttgtgaaagtaaaataaatctagggaccccaaaatcactaagctaatgggaagagtcaagctgggagctgcttagggcaaacctgcctccccttctattcaaagtcatccgtctgaggctcacctgaaacaaacgcatatctgattgcttcctctctcctattgtttctgtgaaaatgcagatccactgaaccagactaaattgtgtattcagtggaaggctgatctacgacttaaaagaatgcaaccttttgcgtcttacctacttctaacggggccacttcgagttgtcctgccttaccggactgaactaatgtacatcttacacatagctgtctcatgtctccctaaaatgtataaaagcaaactgtacccccaaacaccttgggcacgtgtctcaggacttcctgaagctatgccatgggcacatccttaactttggcaaaataaacttcctaaattgactgagacctgtctcacatattttgtgttcacaagctctacatggatttaaggcacagatggtaaaggttttccaaaagtgctcaagcagggataccaaaacattgtatgtgcatatatgactgctataaaggttatacattatccacaaaaagcaaagagaaagaatggaattgacattctaagacttatctaggtaactgcttctctctagtggagcttttgtcattaaacaaattgtggggacttctcttattttggctagaatatacttttgtcaggccagtgactctactcaaaaatgagatacacttacagatacagaaacatagatgaggatatccgcttaaacaagagagccaccaaggtagtaagaaattgaagggtcaagaccgtgtccaaaagggaagtgcaaaggtgagaatgacatttagcacctgttttccccttgaggcaactgccaattcataagcagtagcctaaggctaagaagctaaatagtgggaaataatgagcagaaaacagaggaccagaggttgaaaaggtgagcagaattttaggctgtcttacatgtctgggaatacaaaaacaagttcaggatcaatcaaggtgaaagaaccttgaatgagcagaaaacagaggaccagaggttgaaaaggtgagcagaattttaggctgtcttacatgtctgggaatacaaaaacaagttcaggatcaatcaaggtgaaagaaccttgaatgaaaagtaaatataccaaccctcaaaaggactaaagctcagctgtttcatcagctaattgccacactgatctgctcttatccaaactgtttgctagaagcaaaaagaaaactgtctgtgaaaaaaagatagtatcaagagttaatgtcatcaactcaataatttttcattcacatgtcaggcattcagacaaaaattattgaccatgctaaaagataagaccaaatgactgaaaatagaaaagtggaaactgtattaagaattatcaagcatgggcttccaaattacttgtaagtaactgtaattaatatgctctagaaaatatacaagatgatgaatttcagcagagggtccaaatcagtaaaaataattaaatggaacttgtagaaattaaaaataatagaactgaaattaagaacgcagtaaatgagttaaatgacagcttagacatagctgaagacaagttcagtgaattacaaaataggtcaataaaaatccagaatgagcatgaagagaaaaaacgaataaaacaacaaaacagaaaagaatctaacacacgtatggctaatggtgaaaagccctgagtaggcgaggaaagagacaattggggcaaaagtgatagaagaagagattatgcctgagaattttccaaaaataatgaaagacaccaaatcacagattcacctagagacatcatagtaaaactgtttaaaacccaaaacaaagggaaaataaaagcagctgggggtagagtggggtagggtacacattttcttaaaaggaataagattcacagatgactttgcaacagaaacagtagaactccaaaagaaaagtaatactgccaagatgatgaaagaattaccagatgcaaaatggaatgaagaaatatacaaaggggtaaatgtgaagaaaaatataaatgaatatatagattcataaaacaataataatgtcctgtggtgtttaaacaacagtataaaaaatcatagtactggagcgggcatcatgattcatgcctgtaatcccagaactttcggaggccaaggcaggatgatcacttgaggtcaggagttcgagaccagcctggccaacatcgcgaaaccctgtctctactaaaaatacaaaatttagccaggcatggtagcacacgcctgtaatcccagctacttgggaggctgaggcaagagaatcacttgaacctaggaagtggaggttgcagtgagccaagttcaccccactgcactccagcctaggtgacagagtgagacttgatcacaaaatatgataataataataataatagtactgaagttattctaaggtccctgaattttttgtttttgagacagggtctcccactgtcacccaggctggagtgcagtggcatgatctcatcttactgcagccttgacctcccagactcaagcaatcctcccatctcagcctcccaagtagctgggactacaggtgcacaccaccatgcctggctaatttttgcattttcttttgtagagatggggtttcgccacattgcccgacctggtcttgaactcttgtgctcaagtgatcctcctgccttggtctcccaaagtgctgggatgaagggtgtgtactttgaattttccaggaagtgacaaaaagaatttatatgagatgttgataagtcaggtattaatgttggaatctctaggataaccttaaataatatattctatgatgtgaaagaaaagaaactaataggaggggaaaatagaaataaaaaagagaaatggaatacaaaacagatggaaaaattagaaaacgaattataaactatcttagtaattacattatataaatgaattaaatgttacaattaagaagaaaaattatcacactggatagaaatgattgtacatcttaaaggcatactttagaaaattgtggtcttcaatggaacagaacagagacctcagaaataacaccacacatctataaccatctgatcttcgacaaacagaacaaagacaagcaatggggaaaggattccctatttaataaatagtgctgggagaattggctagccatatgcagaaaactgaaactggatcccttccttacaccttatacaaaaattaactcaagatagattaaagatttaaatgtaaaacccaaaaccataaaaaccctagaagaaaaccgaggaataccattcaggacataggcatgcataaagacttcatgacgaaaacaccaaaagcaactgcaacaaaagccaacattgacaaacgggatctagttaaatcaaagagcttctgcacgcaaaagaaactgtcatcagagttaacaggcaacctacagaacggaagaaaatttttgcaatctatccatctgataaagctctagtacctagaatctacaaggaacttaaatttacaagaaaaaacaatcccatcaaaaagtgggcaaaggatatgaacagacacttctcaaaagaagacatttatgtggccaaaaacatttgaaaaaaagctcaacatcactgatcattagagaaatgcaaatcaaaaccacaatgagataccatctcatgccagtccgatggcgattattaaaaagtcaagaaacaagaggctagcaaggctgtggagaaataggaacgcttttacactgttggtgggaatgtaaattagctcaatcactgtggaaaacagtgtggcgattcctcaaggatgtagaacccaaaataccatttgacccagcaatcccattacttggtatatacccaaaggattataaatcattctactataaagacacatgcacatgtatgtttactgcagcactatttacaacagcaaagacttggaaccaaccctaatgcccatcaatgatagactgtataaagaaaatgtggtacatatacaccacggaatacaatgcagccataaaaaagaatgagtttgtgtcctttgcagacatggatgaagctggaagccaccattctcagcaaactaacacaggaacagaaaaccaccgcatgttctcactcataagtgggagttgaacaatgagaagacatggacacagggaggggaacatcacacattggggcctgttgggggtggggggcaaggggagggacagcattaggacaaatacctaatgcatgtggggcttaaaacctagatgacggatagacaggtgcagcaaaccaccatggcacatgtatgcctatgtaacaaacctgcacatctgcacatgtatcccagaacttaaagtaaaattaaaaaaaaaaaaagttaatgccaggtaaattaggcacattttgaaatttaaaacttttaacaaaatataacggaattttttaaacctcagttaaataaaattttaaaacctaacataaaaaaggctcaatcataaaagaaaaaaaaaaaggtctgattaaatttaaccgaaaaattctgtgagattaaagatagtcacagaaaatgttaaagacaagccacatattagaagtcctatgagctaaagcattatgatcagtaagaatacaagtaacctagcagaaaaataggtatagattatggacaaaaatctgtcaaataatgaccaatatatgaaatgaagctaggcttcttaaggaaatataagttaaaacaaagagctactatctcatagctttcagactgcagaacttaaaaattctgataagactacgtgttggtgacaagataggaaaaccagaattctcttaaactgcagctgggagagcaaacttgcatatcactttggagggcaatttgaagacatctaaagtgacagagtatacacatcctactacctggaaatccatttttatttattttatatatatatatatatatatataaaatttttttttttttttttttttttttttcagactgagtcttgattgctctgttgcccaagctgcagtgcagtgccacgatctgggctcactgcaacctccctaagtagctgggattacaggtgcacaccaccatgcctggctaattttttttttacttctactagagacggggtttcaccatgttggccaggctggtctcaaactcctgacctcaggtgatcctcccacctcggcctcctaaagtgctgggattacaggcgtgagccaccgtgccgggctgaaattccatttttagacatatgtctagaatatctagcacatctgcatgaggtgacatgatcaagaatgtacacttgcagcactgttcaaaatggcaaaaaaataacaatttaaacaatctttagtaagggaactggtaagtaaactgatatgacactaaacagcattatgttgagtggaaaatcaggttacaaaagattacatacataaaacatcattaacataatttttgttaactattatacattgtttctggataaaaacacatggtaaagtataaaatcttaaacaggaaggagtcacaccaacttcagaattagtacgttagctctagggaaagaaggaggagaatggcgccagggagaagtacaaaagagtaacattttatttatttaaaaatcagaagcaaatatggcaaaatagtatgtgaagggtacaagggcatttatattattatttttctgcatatttgaaatatttttaattaaaaagaattttaatgggcacatatggtataacaatcaaataataacattaattacttgcaccacaaaaatgtatcaaataacaacatattatttaagccacagacacttatgtacatacattggagcatgtgataaaagagtcaaaaataaattttaaaatttgcaatttactttggggttttaaattaataattttgctaatctcatgcaattttaaaatgtccttaagctaaaattttaagggctgtaatccttttagttagagttgtcaacgctgtacagatgtggtattctgaatttcagtcttatcttgtaaagctttttctttagtatataaacagttaacaagctttacaattatacttacaagtcttaaagaaatgtattaagagtcctaagtatgaagaacagttatttaattataactacttaattatagtgtttcaccaagaatctgatgccctaatactaatgtggaaaaacaatgctccattattccattttcttttctgcttggggtttgggccagaagccaagatgtaccaatactggaaaggttttaaacagtcttattataaaaccatttttaaaggaaaagtaataactttcacggggagtaacacaatcctttgggattactatgtcagaaagagacatagaaagatagagaatattttaagaaaagggttaacgaggtagtaaaattttgctatctgtacttcacttactgaccctcagaggctcaaggctagaagacaataaatattttacagtaaaatgtaggaggcaaacaaaactgggcaggacactgcatctataaatataattcgagagatctataactcacacatagtacttcactctcaactataatcctctgaccacattcatactatttcaatagtcattttacccagtagatggaaagcagtaattttatttatcatgaattgctttttgccaattaaacatgtgcaacagagatgattagctggtctctcaagtaacctagatattagatatgctatttccatgtaatggaagactgcaataaaattattccaagttctaaagttccacacttttatattttgggcacaatttttaagagtggcaaaaggcaggttttcacttactccacttcagcctattatactgaattttacctagtgctaaaatccttaactttcatttctgaaggctgaaaaacatttgctcccccaagtctcttatttagtataactttggctggtaagaatagctcagtttgcttccaaaattgaaagtctcctacaacatttttaaatgttttttttttccactgatctttaagtttcagtaatactcatttatttcttccctctcaatagaaggataactaccactccgcttcatgaatgaaataatcaaattactatttctctcaaattctcaccctctagagactcgctcagagtgataaattcactgacaagtttacaattcaaatttcactaatatatagaaataattctcccacaagcaaaaaggtcagcatcaagaatttaattttctgagtttcataacccttgataaatggaggcaccttaaagttcagtttaaactcttttatataggatttcagagcatgcctccagatatcttaagacaagccgtattaatagcttagtgtcatttttatcattaaaataatctacaaatatcagaatactaatttattgtcataactaataaataaggcttaaaatatctatagatgtaaatcagctctctcagttcgttttgcttcacttggactattctaaaacacagatcaacaaacggaatgggtttatcaataatatagttgtgcaatcttttcacaaattccaattctgtaatttaggggtttttcatatttatttttaaatatacaaagaaattaaaccattaatagaaatattttctctcaaatatgtaatattcttttgtaaaagaaagtttccaaacatttacaaagcaatctaaagttaagtaaacctgattttaggattattacattaaccaaaataattttccagagaaggtcctatttaaaagtaatgctcactggcttccccacatccacactttcagacggatccaaatccaatgcctttgtttgatgtacttcagggatcccttccagtgaaaaaaatctcagaaaaacgtctcacgacacagtggacaagtggatttgttgctagatgtaaaccatttgtactgaaaaagaaaaggttttaaatactaaaagaacttttaaagttctcctctaacatacatcataaagtacacatacatctatagtaaccttcaaatgataaagtgaaaagggaagaacaataaaatttttgctctttctgttatctccaaaattaacacaaattgagtattacttccgatggctacactaagttcttcctacttaggctcatgcacacaatcactaagatataagaaatctcctgtgaaacaaatgaacaaatggcaacttctttttcagtatgtttaaaaagagcacagggctctgatgccagatggcttccagtaccaactcctgtactctccttcatggtctagatctcagaagaccttctacttcttgagtggtaaaaggtcactggaaacacccatttattagagggccttgattctaccagtctcagtaaactgctaattatctttggcagattttaaaaaatcactttttaatatatctcccattagctacaattaagtttaacacacattttctcttccgaagttagacattgtgtaggtgtgtgtgtgtgtgtgtgtgtgtgtgtgtgtgtttatgtgtataaaatacataaaatataagtaagttaatttctctttagacttaccaagcaggctgaatggaattttttcttgcatgttctacaggcttttttgggaagggaatagttgaaaccgtgaatgactgagaaacagatcatgcaatcttcaacaccctcaaaacgtttgtctacgttatttttccataaagctaagccttccataatacttccattctgttaacaagaagaaaaataagtcactacacactgataaccaccaattttatttttattcaatttcacaaattttaaagttgaattacaattctgaaagaagagaatctgcttggctatgttcatgtctcccaacttatgaatgttggtttttaaaataacctcccaagtttttggaaccagatgtaatttttctccattaaagacatactttaaaggcttctggaccaatacttaaagtgttatagtctaagcttgttgcttgataaaactctcttaataattaaatcatttaggttagttctaatgtttaactgaaaatgatgaaattatctcaaatgatttgttccagctctacaatattggtgagcatatttgttttaaaatagtttttcttggccgggagcggtagctcaagcctgtaatcccagcactttgggaggctaaggtgggtagatcacttgaggtcaggagttcgttgaccaccatggccaacatagtgaaaccccatctctactaaaaatacaaacaattagccaggtgtggtggcgggtgcctgtaatcccagctactctggaagctgaggcagcagaatcgcttgaactgggaggcagaggttgcagtgagctgagatcatgccattgcacttcagcctgggcaacaagagcaaaaactcttaaaaaaaaaaagtttttctttattgtagaatgcctgagatacacaatgtgcacacagaactgaagatttaaaatgtgtttagaggtcaaaggtctttgagggtcctgggacttctctaaccaaagaggagttgaaatgtaagaataaaagtgaaagtagctcagaaggcattcatctgtccagtatctttcaaaacatcctctccgaaacaattttgttaatacaccttctacagtgttaatgaaataaagtcaatccctctcaaacaccagaaaataaattacagaaccttaacaattaaaacagaaaggcaggtttaatccatttaggcatatctctgtatttatccaaggaagtttaatatctacttttatcttaagcagaaaagatatattttatgtttaaatgcccttttaaatagatcatcttttccaagtttgtaaagccaaatgtgtaaacagaaacttacctgatgggtgaggtaagtgcttaactgcagcatccagttccgccactgctgaacagctactcctactcttttcccactttctactattattgaacccagtggataatttgaaggcagttgtattataagttcaataactatgtcctcaatagtataagtagccattacctctcgagtagtagctcgagctttaacctgcaatacaacaaaggatattttgtttgccaaatttctgtctttcaaccagaaaacattttgataggttgactattaaaagctaaagacttcattcaaggacagtgcaggtaaatacattcacttatctgacatgagataattaagaaatacgtttaaatacctgcctggtatatttttacagtgattttgtgatattcaaagtttgttttaaaagaaattaattgctcataaaaaaggttttattatattaggcttgtcacataatagttcaataaaccttgaatagataagtgacagaatgggttattatgcttctcttccacacccagagtatcgaatgtcacttctacatctaacaattcttcctctaccatattatcctcctgagctttggagccaactatcaactgtcagaacatttatagttatttgtttggttttcaaaccaacattgcaaactcaacataaaacgcacacattattatcctttacaaacttcatcttctgaatttcctacttccaggctaaaaaatcatgatagctcattttaaatttctgcttctacctcatcctagatattaactaaatcactagcacaaaatctctcacatccctacttttatattcccactgttactgcctcacccatgccctagtcctttgctcatgtctaccccaatagtctcctctaccattcatttgaatccaaactgtttgccaacagatcatgctatagattgtggtcagagcaatttcaaagattttaactctgatcatgctactgcctgaatgaaaaatgttcagtggctgaattgtaccactttagaccgttatttgaggcccttcccaacatacctcttattcaccgttgattctattcacccttgggactcctacgcattatttgggttggagtactgcattatttatcatttcctgggcaacgactgaaatgacattctcacttctatgctttttgcttttgcaatactattctctctctctctctcttttttttttttttttgagatggagtttcactcttgttgcccaggctggagtgcaatggcgtgatctcggctcaccacaacctccgcctcccgggttcaaaaaattctcctacctcagcctcccgagtagctgggattacaggcacgtgccaccacacctggctaattttgtatttttagtagagatggggtttctccatgttggccaggctggtcttgagctcccgagctcaggtggtctgcccgcctcggcctcccaaagtgttgggattacaggcgtgagccaccacactcggcctattttctttatagtaaatgccattcccttcattttccccataacaaaatcctgcccacctccaagtgattttcttccataaaatctcacttaatcccctcagccagatgaatctttcccactcagatcacaaggcactctttctcttaatatgctactttccaatgcaaaaataattatcagtctcgctcttttccctttattagactgtatgttattacaggacaagaatctggtcctactaaactgttcatatccttggtgactgggacacagtgcttggcatctgtaagtattccagtacagattttgaatgaactaatgaatgctcaaaaactatttggtgggtgaaatggtttggatctgtatccccgctcaaatctcatgctgaattgtaatcccaaatgttggaagtggggcctggtgggaagtgattggatcatggggatggatttcccacgggtgctagtctcgtgatagtgagtgagctgtcatgagatctggttgtttaaaattgtgtgacacctccccgcctctctccctcctgctctggccatgtgaagtgctgactcccatttgccttccgccatgattgtaagtttctgagtagctgggattactggcgcccgccaccacgcatggctaatttttatatttttttagtagagatggggtttcaccatgttgcccaggctggtttcaaattcctgacctcaagtgatccacccacctcggcctcccaaaatgctgggattacaggcatgagccactgcacccggcctaaacctcttttctttataaattacccagtttcaggcatttatagcaatctgagaatagactaatacagtgtgtgaatgaaattataccactgtttcaatccacgcatgaagtaatgttgagatttgacacacaaattagaaaataaaataggctggtcttgaactcctgggctcaagtgatcctcccaccttggcctcccaaagcgttgggattaaggcatgagccacgactcctggccaccagtttctataaattctgagttaagagctacagtctgttatgatattaacaatgacagacatacccaatattaaaacaacttttctagagaaagtcaagacaatactaaccgtcatgccattaaatagttgtgtacttgtttgtacagaagatatttcttgaaaagaaagaacactgctgacatacttgcttgtaaatctatccacaatattgaaaacacgcttctcactgctattccaccacaacctaaccatggcaggcaagtcttttaatgtcatatgatagactgaacaagccaagtgtggaatgtggtatggaagcattgttgtttctgaggaaaaaacaaattattgattagtaacatatatttcttatatagaataacagactaatattagtattttctttagaaagtgatccttaatttctcaacaatagtgctatagctcataaaaacaaacataccagagaaaccagaactctggagtatgagcatctttccacacattcaaaatgaaccataagaatggcaaaagaatttttttttaaagtgaaaatcccgccgggcgcagtggctcacgcctgtaatcccagcactttgggaggccgaggtgggtggatcacgagatcaggagatcaagaccatcctggctaaaacggtgaaaccccgtctctactaaaaatacaaaaaattaggtgggcgtggtgatgggtgcctgtagtcccagctactccggaggctgaggcaggagaatggcatgaacccggaaggcggagcttgcagtgagccgagatcacgccactgcactccggcctgggcgacagagcgagactccgtctcaaaaaaaaaaaaaaaaaaagtgaaaatcccaattgacactgaaaaatctacctagaaacagatttctgtatttaacatgaagaccacaaataaaatagaatacacatattttaaaaagaaggaaaaattaaagatgcttgctgttataaattatgaaaaggagtttggcctcctttactttccccagagcttgctgaactgctgtgcagaagtcttggaatacccaactcaatactcacaagatgcagtccatcctcagatctccaaggcatttaaaaaactcatattcttagtaaattgtttccaatactgtagtacaaccagatacatgcatatctgtcctctcagctcacatgtgagctcccagaatgaaatgttattcaactttatttcccctgatttatatgcctataaaatgttatcacgtaagaaatatttgtttacagagtcaaaagttaatagtctcaccacactaagcttcaaaaatgtattaaattcctcacagtcttatgggtaaaaactaattattcatcctatttagagaaatatggaaaatggtcaatttcaacattctcatagccaggacccacctttggggttattctccacattctcagggaaaagtttaattcaacctagtctgaatctagtgtccaagaaagaacataaacacatatcttactgacctctaatactcagctggagctcctcagtaaagaatgttttagggtccttatttgggacctcaactgctgtctctgcataggttggattttctggcataagcctgaacaggtgatagagcaatttattcaaactctttgttttccgaagatacatggaatacaaagcccgaagctggtggagagcaaagaatttgttagtaaaccaaatacaccaagacaattggtataaaagaacaactcaaagtgtaacaaatttcctttcctcataaactagcagacattctatcccctcattattgtaacacatttctaatatctttctcaaattgtcttcctgtattacaatgcactcaccttggcttagaatgtctgagacaagaaaatctattcaccattcccacagatgactccctcactctcctcccaagtcttccatacattccttccacaccattgcccttaacctttcaaattcctgcttaaaactaatcccatttttatggctgacctcaccctgtatcaaaaactccgacatccctttacgacagagagcacaaactagtggtccaaaatgtcatgggggtcttctcagagttgttttttcaatcaggaaatttcacataaaaatatggatttctgatttctcttttaaaaacagaaaaacgagccaccagtgggagcactgcaggtatctgtgtgagacctgtacttcacaactcctgctttccctccataaagtagcttgcattttccacattgactttgcagttctttggtatctgtattggttttaagataatttctactatatcacatatctcctcacagtacaaagatatcattttctttcccttttctttttaaaaaatttgtatttttaatttttgtgggtacacagtagatatttatggggcatatgaggtattttataggcatataatatgtactagggtaagtggggtattcatcacctcaagcatttatcctttctttgtgtaaaatatagcattttctgaacactatgaatacttaagtacaaggatcaagtcataggatttggaattgatttttaaaatatgttgaccaaagtgctcttatcatcaaacttaacatcactaatgaaggatgaacatcccaaatctgaaaatccaaaatccaaaatgctccataatctaaaacttgttgagcaccaacatgatgcttaaaggaaatgctcctggagcatttcagattttcggatctgggatgctcaaccagtaagtgtaacaaaaatattccagaatctgaaaaaatctgaaatcagaaacactactggtcccaggcattttggataagggatactcaacctgtaaaagaacacaatgacattatatggctcctgaggtaagacactgagaacacataacaacttgtgcagtaagtactattgctaaaaattaaccacaatctaatgaggaaacgatcagacaaattcacattgtatgacaggctaaaaacagctggccaaaacaatgacaagaaagaaaagaaaggtatagaaattataggttaaagaaactaaagaaatatgacaagcaaatacaaacatgattcttgattggatcttcaatagagaagaaaataaaactatagagatattactgggacaactgaaagtatctaaataaaaattagatattattgcatcaaaattaaatttcttgagtataaaaattatattatgcttatgtagaaacatgtccgtgatcttaggagatatatgcttaaatacttttggtaaagcatcaaaatatctgcaacttactttcaagtagatcagcagaaaaaaagtaaatacagagaaagtatgtgcaaatgtagcaatatgttaaaagatgtatgtaacttttttatctaaaagagtatgtgattttccattgaattattcttccaacttcattgtttaatttttcaaaacaaaaagttagagatttttaaaaaattaatcaccaatatcaatggacttttaaaaacacacatatacgacccagcaatcccactccaaggtatacaacacaagtgaaaacatatttcaacacaaaagctcgtacacgaatgttcacagcagctttattttcaatagccaaaaaaaaggaaacaacctaaatgcccattaatggataaacagatagataaacaaaatgtgatagatctacaaaatggagtattattcagccacaaaaataaatgcaatacttatgatacatgcttcaatttgataatcttgaaaataatatactaaaataaaagccagacacaaaagaccagatatgtgaaatgtccagaacaggcagatgcatagagacagaacacagtttaatggctgtcaggagctgcggggtttgagaggaaatgggaagtgattgctatcaattacaatgggatgttgaaaaggttctaaaattatatagtggttaacagttgcacaactctgtgaatacagtcagccctccacttccatgggttccacatctgagaattcaaccaatcgcagattgaaaacatttgaggggcaaaaaaagtgatttaaaaaaaccaatacaacaataaaaatactaaaaactttaatacagtatagcaactatttcaatagcatttacactgtatcagtgataactaatctagagatgattttaagtagtatacaggaagatgtgcataggttagatgcagatactatatgccattttatataaggaacttgagtattcgctggggtgggggtcatgggagggagcctggaaacaatccccagcagatatcaagggatgactatatactaaaaacaccaaactgtgtatgctaagtgggtaaattttatggtatgtgcaatatctcagtaaagctttataaaacagacacaaaaacatacacatgtacatatacaactttttccagttcaatctgatttgctagtttttttgagaaaaaagttaacccatgatttaggaacatttaaagttttccgaagaaaaattctgtttatttcaggattcatctaattagtattacttagtgggttattctggtttatctgcccacagctcagttcaagtttcagactcaataataataaatgctgccgtataattttgcaccctaacccaatcccagcttaatgaaaaaggtgacacatggccattttcctaatttctgaatataaaatgagaacaaaactcttatacacaaatgcctcaatctgctgctattttttaaagatcaacaatattttaagaaattgatgtaaaagccaaataaggagctcttgaaatatatcatcagcaaataaaactagcttaagtcacaaaaataagtgacaggcctaaagagaaaactaatctatttaacagctagatcaatgctgcttctgtgatttgacttttccccacagatatacaaatgcaaagatgcaaaaattgatatctttgtaccagggtatagggtatgagcaacaacataaattataatttaaaaattccaaaaagtcacattggaaatgaatgccatgaatacttaatcacactaaatgataaactaaatctttttgtattgacctgtcaaaagaaggcacatattttattaggctaattcaatcaaagattgacagagatttggatcttccttgttctttttgagacagggtctggctctgtcgcccaggcttgagtgcagtggcatgatctcagctcactgcaacctccacttccccggctcaaactatcttcaagtggggatccttctaacagaaaaactagagagatctttccagtttcttcttggacaaggtcttacttcctaaacatgagacaacagagacatctagtggctgctagaataatttggacaaaatatttcagatattttcaccacttaggtaacagtttgaattattacataggtaatgtttcacagatctctctccaaacagtgattttcaagtaaggtaaatttccaatgatgtattaagttatatctccacaacagagtgacaaactgactccctccgaaaaaaaaacaaaaaacacaagatccaattcttttgaaatcattactatgatagtacaaaattaaattatataaatattatttcctgaaataaaagaacctggtgactacattcagttagaaaaaagttgatctggccacctatcagagtaattacttttgcttggaaggtaaggtataagggacaggagtaaacttattaagcagatggaagttagttggataaaatgagattaggctgggcgcagtggctcatgcctgtaatcccagcattttgggaggccaaggtgggtggatcgcttgagctcaggagtttgagaccagtctgggcaacacggtgaaaccccatctctacaaaaatataaaaattagccaggcatggtggcttgcacctgtagtcccagctacttagtgagaagatcggttgagcctaggaggcagaggttgcagtgagccgagattgtgccactgcattccagcacaggcaacagagtgagaccctgtctcaaataaacaaaataaaataaattttaaaagatgagattaaaacataaggattttccttttattaaactgaaaggaaggtatttagaacagtatcagaagcatattaggacagaactatcgaaagttgtcacatatttatttacctgtgatgatgcagctttgaagaaagttagtattaatttccaagtgagaaggtatcccagaacataacagaagtcttcactcagtggtttaatagtaactatctgtccaacaggaatacaccccaaaacattttctagtaagtcctcttgaatgctaagaagagacatcagtgctgctggtggtgacctaagaatcaatgattaaacaccacaagttttctttataattcattccttaacaaattgacagtacttgtaaacttcaagcattttagaaaaatttctctgttttccaaaaaacgttttaaaaattcccctctattgagccaattttaactcctaatctcacataacagtaaaataaaaaagacatattatagcacttgaaggaaagacatttttagaaaacgtctctttcaattttctaagtgaaaaaaaatcacacacccagagaagccaaatgatgagtccaacgtctttcagttagtaggggaaactgttagggattctaaatcctacccggccttttatcatcttataaaagacaaagtgaagattaagacttcgaactttgtcacttcattctagtttctattttattgcatattatctacttagtactattaagaaatatcacaatgatactattaatcggataaacacagaaaataattatgtgcctgtttaaaaaatcatgattgtaatctttttaggaaaataaatgtaccattcagattaattcacaacaatgtaagttaattttcttctttattgaactactctactcatttatactttcaggtgaacttatgagattctcaaaaagtaaaatacttaactctcttctccatgatactctagcctggttctctcctttcacttctgtgatcgttcttcccttgtggcttccttctcccagcccacaagtacaggccttctccaaacttctgctcttaggtcttttccttcaacacctccatctcatgtacccagccttctatattccatactgatagtcactagatcttataaaataccagctccaaaatctctccacttttcacattgccctccatgcattgttatttaacttctgcaatcagctccacctctgcttgcttctttttacaattcatgtttcacattagtgtcagaatcggctggtggcgccctatctcctaccaagtaatgaccaaatccccccaaaaaagtcatttttaaggccatttattataggccaggaagcattctggcctacagcattctagcctatttctctctcagaaataagagagagaaattcctgccctcacagaacttacattccagtaaagaaagatattatcaataaaactatacattaagtggtaactactcaatattccccaagcacatcctcacattcatgactcagtgcctttgtacatgatgttctcttaacttatgttgtctttcctgtcctgcagaaatgctacctaaccttaaaggtccagtttaaatgcctcttcctcaaaagaaagtcttcccttcctgatgtacattaattgtgccctcatacatgctatcttatataggcctaactgacctttaaaaaaaagttatctatcctttttcttagcacttatcatatactatattttccataacgctacagtatcatctgtatcagataaattccttaaggaaaagaaagtgctcactaaacactgcatattcccctcagcatttaattaatactctgcacaaagtggatgctcaatagatacttgaaccgatacactctttccacagccaccatatggccaaagatagttttactgaacagtagcaaacggaaaatgtgatttaagaacaattaagagagtgacacaatcttttgggtgaaatctatatttcatttatatcttacagataactaaaaagatctatctgtagaatgaatataactctatagcttctgtgctgcttcagtcctctaaagacattataagtgagatggattataagaatttaataaaacaaattatttaaaaaaaccttacaaggctggctcttcttcttcatctccgtatgactttagattatcctgatcatactgtggtaattcaggcatcaatctagaaattagaacattatttttaaatatgtgatattaaactgtttattaagtcgtgctcaagagcagaaagaccaatacttattttataatgagtaaatgttttaatgagttttctttaaaataactactatagccaggactattgaaatataaattgtgtatagagaacaataacctaaaagatgaggcaacttagggtccctataagtgaagcagtcagatctccttcttttaaaaattttactttaaataattaaaagtaaaaactaagcatatattctatttttttagaccactgtaacattgattcaattggatgaattcttacttgtatagcatatgataaacagcaatttgcacaggcctagctctgaagaggagtaatggggccaatgtatttaacaaagtctggagatattctggtaagtttgttttttggtcagcaactaatcttgcaggaagtttgtgactcaatagctgttcctttgagatatacgttaatgtttcacacatgggtttcagcattgcattctgaaaggatgtttcagacacatctttgttttctcctaatgacaaaaaggaaagaaacatgcacgtctcaaaagaaagttagtatagcttaaatgattcacaaacaatcaaatgtcatttaagaaaatgaaataaaaactagacataaacaataaagcagtcttaactagaaacatgaactgaatatatattccagttaatctcaactgttttaatgacttttatctgatccagcaaatgttcaatagcaaggttctattcacatcatccattcatgttatctgaagtattattattttaatttgcaacagtcattggataccttgccatttttcaatttctgtctgtaaagtaaagcatagatgatgcttctgagaagccaagctttctcttctggctttttcttttactatttagtattatttgatttaaacatcaaaatttttgcttttgaatttttcagtaagtcatttccaatgaatcaatctcactattattccctttttcacttgcctgtaacagtcaccaaaataggtaaaagcaaactgtggatgccttgggaaaaaaattctttccattcactgattagatttacaggaagattgccaatggtatccagagttgtggaatcaaagaaagcactgaggtcacaggccaaatcacagctgacacaggcaaacagttgcacaagtggaatagaatacaatgcctgattctcacttgttgtctgaaaaaacaataaaaatgaaataggtaaacagacttctaccagaacactacaaataaagccaatataaagaaaagccccactttcatttctttgaattttaaaacgaaaagcagttgaggtgtgtaatctcaggagaaacataaaattttacatcaaaataacttttttcttcaaaattaaataccatgaatagaatcattaataaacaatttattctcaagtaccctttttaatttctaacccatggaaggaaacactaagtcagacacattaaatacacatttataatcttctcagtagccctacaagttgtaagttattattttaaaataagaaaatcggccaggcacagtggctcatgcctgtaatcccaacactttgggaggctgaggcaagtggatcacatgagggcaggagtttgagaccagcctggccaaaatggtgaaaccgcatctctaccaaaaatataaaaattagtcgtgcatgctggtgggcatctgtaatcctgctatttgagaggctgaggcacaagaattgcttgaacccagaaggcggaggttgcagtgagccaagatcgcaccattgcactccagcctaagcaacagagcgagattctatctcaaatttaaaaaaaaagaaagaaagaaagaaagaaaactgagtctcaaatagtttaagtttaaaactctaagtcacatagctaatagcaggcaaagcagagattcagaccaatccaaccctgactgacttgctgccttggagcccacaagtaatatacctctggttgctttgggtcaaaaattacactaattccctctgaatctgctactatttaatgcattactctcacaatattcacacagtatgttttagaaataatctaattataaccaaaaaagaccaaaataattgtcattaacagataaaacctgaaagggctgtgctgcaaatattacaataagctaatggagaaggcattttaataacaggagatttggtcactgaatgatgctggtagtcattaaaaatctatcattttactattctgtcaaatagtagctggtaagaagaacatctataaagtgttttaaattatacaaaggaaccaattacaatcatcacttaaagaatgagattagtaaatagttctgatgcaaaagtatgtacaaaaacccacaagaggtgatgacatatcgggttaatttacctccaaccaagccaacatggagcacatgatgaagtcccactcactctctgccaaaggggatgagcagtatttcagaaatagggaaagaaaccggattatttctatatttacacccagtacctctggacttgcttctgatagattactgtgataaagataaaaacaaaagacaataaaagattatattgacattcaattagaaagtatgctactttaaatcttacatacttatttataactgacttaaatgtctaccataatttctctacaaaattgtgacacagatacgtaatctttgtctgaattgtatactgaaggaaaaacatagtataaagtatcacctaccaactgaaaagaaaaatatcttcatgctctttcttccaggatattatgatttttaatattccatgtaatagctctccatcatctatacttttggtttgcagacaagaattgaaaatggcaagatgtccaaaacctcctaaagtaaaattcaaaatgaaaattaaaaatatttaagaactatatcgctactattaaaaaaaagtccactttgagaagtaaaagactttcttgagaagtgttcaggttaagaactctaataatgacttttatctaagagtcaacaaatgagcttataagctccaaagggcagagaccctgtctccaaacccagcacctagcacacaatagagaatttgggggaggagaaagagtgaatgatgctgtaatttaaactgacttatgctgtttttgttttggtttcttaagtgcaggacatattcagcaaactcatcattcaaataaaaaaaaccctacagctacagagtagctggaaacagcaaatggaaaatagaacatactgtttcataatttatacattcattcactcaatagcagctagtacatgtggtaaactctgatgtggactcactctttagaatctctaccattcctcaaaatccatccactggtgtatcttaacaccctctgtccccaaccttctatcttacataccagccaaaatgaacaatctgtacccttgtatgtttttgtgtacctggaatgcccttccccaactatgtccatatggaaaactatttatccttcaacacccagtagaaatatttctctttgtgaaattgccactaacaccctcaaagcagagtggaaactccttcctttctgccacttctatacatagcacatctttttgctacatcggttatcacataatacaactttatgtttgtcttctctacaataggaactaccatgtagcaggtgctcataaatgtttattaaattaataaacaaatgaaaagtgcagtgttttaaatacaacagacgctatttttgcctttatatgttcaatcattgattggctagggagaaatgaggcacagctttaaaaagctatagatagaaaagaaatggttagaaggtatttctgggcgtaagtcttcccttaaggcccagcatttttgtactgtaaaatggtaacagccactgtctaacaacactcatccatataatctcagaacaaatcagctgtaattcaatttacctctgctagatgtggtcttatatattagaaacagttcttcatctcaagcaataattaaattaatgaaatatttattatcaagcaactaaccattagtgctgcaaagatctttcttagtccagcccaaaagagcaggtatacattgagcactaaattctttcttttcttcttttgacaaaaatggacatagactttgaatggtatgcaaattgccttcagttagtggaaaaaaactgtttaaagaaaaaaaaaacacaagttagatttcttccaaacatacagttattttatatatttcttttatttagactactgaaaaagatagatgaataattctatcacatataattacataaaaagaaactatgatagatttaacaagtgctgacttgatgaaattggttttttttgctccttttctcttttctgcataaattttttaaatgagcatatataacttttccccatatatgattttttaaaattatactagccacatgacattatgtcctcttttaaaaaaaaaaaagagtcaattgcggggtgcggtggctaatgcctgtaatcccaacactttgggaggctgaggagggcagatcatgaggtcaggcgtttgagaccagcctggcgaacatagtgataccccatctctactaaatatacaaaaaatcagccgggtgtggtggcaggcacctgtaatcccagctactcaggaggctgaggcaggaaaatcacttgcccctgggaggcaaaggttccagtagcttgagattgggcccctgcactccagccctggtgataaagcaaaactctgtttcaaaaaaaaaaaaaaaaaaatagagtcaattgattcaacttaaataaatagtaccagttgtgtgtcctttcttttctttctttttttttttttttttgagacggagtttcactcttgttgcccaggctggggtgcaatgcacgatctcagctcattgcaacctctgcctcccaggtgcaagtgattctcctgtctcagcctcccaaatagctcggattacaggcatgcaccaccatgtctggctaacttttttttttcatttagtggagatggggttttaccatgttagtcaggctggtcgcgaactcctgacctcaggtgatgcagccatcttggcctcccaaagtgctgggattccaggcctgtgtgtcctttctttgaactgatattcgtatttgtgcatatatatagttgggttttattcacataaaaaggatgacactaaacatattgttctatcatttaccacttacatatactttctgtcagaacatataaattattctgttttaaagctacgtaacaaaaatgaacaaaatctacctaacactccatactatggaggtatcattatttaactatttccctatcagtgaacatttaggtttctcccctccccaaatttttgctgtcacacataatgctgcaataaatatccttaagaagatactattctgtgtatgtataaacacctctttaggctaaattcctagaagtggaattgaaagctcaaaggatttgaatgtattatatgttggtgatctcaaattgcttctgaaaacacataatcaacttatactttcaccaaatatgcacaggtgtgactgtttagctgcacatttaatgaatctttttgattctcggcaatatagtggataaaaccattgctcttaatttgtacttctgtcattattagtaaggcaaatcctttcatatttcacatttcagtattgagctacctttgaccatttcatctatgaattgcctctttaagtctttgataaattttccaatttggagggttttactgatttatataaactatatgtagatagttttttgttgatttgcaaatgtcatctcccattttgtcatttgtccctgtaatctttatattttgtcgcagttttcatctttcagaaatactatataaaaaattttaactgtcataaaatacacataaaattaatgtattagccattttaaagtgtagagttctgcagtgttaagtacattcacactattgtgcaactaatctccagaactcttcattctgcaaaactgaaactctacccactaacacgaatgctccattcctctctcaccctcggccccaggcaaccaccttctactttctatccctatgaatctgactactctacagaaggaatcatagagtatctgtctttttgtaactggcttatttcactcagcataatgtcctcaaggttcatacagactgtatgtagcatgtcagaatttctttcccttttaaggctgaataatatcccattatatggttataccacacttttatttatccatttatccactgatgggcacttaggttgcaagttttcatttttacagaatcaaatatatatatatttacataaaatgtaaaggagaaggtctcagtatttttcttccaaacacacaaccaattttcccatcattattatttactcaccacagtgatttgaaatgccacctatattaaaaactaaattcacatttatgtgtggataggtttctggactgtatccactgatttgtctactcttcaatttcatactgcttaattactataattcaataatatatgttatatttggcatgcagtctctttcacttttttcaaaaatttcttatttttgagaactttttccttcaaatgtatactatgttcagaacagtttactaagtttttcaaaaactgctgaaattttgattgagatcgcactgaaattatagattgacacaatcatttttacaatttatcttcccaccttcttttgtgatctttattcaagttttataattgtaattttttgttaagtttatttctaagtatttatagtttttgttatcattgtgaatggaatcttctttttctcccataccattttttaaattgattactatgggtaaataagaaagctattcatttttgtgtggtaaatatacatccatctccttagtaattagttccaatagttctttagctaattccgtattacttttataatcagaaaaaaatgttaattatgctaaaaaagctaatgtcaaaaagttacatacagtatgattccatttatataatatcattttttgtcttgttttgagactgggtctcactctgttgcccaggctggagtgcagtggcgtgatctctgctcactgcaacctccacctcctgagctcaagtgatcctcccacctcagcctcctgagtagctgcaactacaggtgcacaccaccacacctagctaatttttgtatttttttgtagagatgtttcgccatgttgcccaggctggtctcgaactcctgggctcaagctgtcctctcactttggccttccaaagtgctgggattacaggcataagcctccacacctggcaaattccatttataaaatattcttaaatgacataattacaaagagagagaacagattagtggttgctagagattaggacaatgggaaggggaagggaggtggctgaggctatatatggataacgcaagggatcctgataatgaaactgttctggacttgactgtggtggtggtcacagatgtgagctacacagaacacacgcacactctgtctctcacacacacaaacatacacaaacatgtgcatgtaaactaagtcaactgactgtatcaatgccttttccttggttgtaatactatgctaaagttatgcaaaacagtaccactgggtagatgtatgatttattctttgtattacttcttacacattcatgtgaatctacaattacctcaaaataaaaagttttttaaaacttttaagataaaaaacagtcaaaatttaatttagaattctactatgccagaacatgtatctatcatttcagaattcttcttggtaaatcagtaaattcaaaatgcctcttggtaaatctcagctaagtattaatttgaatgctgagcttcaccagcacacccaaacccacaatctacttctttgtcttaagaacagacacatttgttacatttctagaatatatttcaataggatgatgttatttaagagaagagtaactttccctatcacttccatatagcaaataaagtgatggaaaaagagtattaggaaagggcaaaagaaaagatttctatcagagagatttctggggaaaagaaaacaagttcatgaaatgctgttggcttaaaaaaaaaagtacagtataaaattctacaacaaaaggctatagagttaaaactatttactttaaaaaaaaggtgtcggccagacatggtggctcacacctgtaattccaggcctttgggaggctgaggcagcaggactgcttgagcccaggaattcaagaccagcctgggcaacctggcaagacaccatccctacaaaattaaaaaattagccaggtgtggtagtgcacacctgtggtcccagttactcaggagggtgtggtgggaggatcacttgaccacaggaggttgagggtacagtgagccatgttcgcatcactgaactccagcctgggcaacagagtgagaccctgtctcaaaataaataaataaataaattcaaaggtatgtccctaacctaaaacaatttaatttgccttgaagtcgttaatttcctcatttcctaaacctgttttcttgattcattagaaattattcattaattaggggttgccaaagtgaccgattacagtaaactacaaagtaaaaacattttaaataagaatacctttcttttctcttataatgtggttttacttcatcagatgaaatgcttcgggaaaggatcaacttagcaataataagagaccacagtgtgccatgttctctggacctgaaaaaggaaagaaaaaaattatattccgttttgaaagcatactgaataaaatgtttaaacactggctagctggattccttttacagaattaaataaagcaccttgtgatggcatcaattcacctaagactttgcacccaagcaactgccagtaattatccaaagagctgagagtttcggctttcaacactccttcaaggctggtattgagctctctcatccctaggcaactccacagtctcttcagtcccaataggggagatgatcttagagattaggcttgaagaccagaggctgtagctgggaaaaagacatctcccagaggacacctaggcaggcttaagttgaacaatcaaagaggttctttggttctgaggaaagttgtgtcaactaagtagaatgcgattggaaaggaagcctgggtcctctgatacagcaaagcatactcaaaatactatcggcaagtgataaactcctaaaaagaaagcagttcaatacagtaatttcaaaaagctaaacatcttactactacaacctctacaaggactgttttcatacctgccttcctaatctaggggagagggctttgtggtcataacattaagacacacctataacaacatgtaagataaaggatgaatctgagagcactgggaggatgagtcacagataaatcaaaacaacttctacaagcttctacttcttttttgtcatctgacccttgtatgtatttatggatttaataagacaggcagaatacaaatatcttcccctgagaaggttaaatcaagtatttagaattcataaactatttattattaagaataggaattatttagatcaatcctctgactgaaacattagcatgcagtagggttacctcttacagaaggcaaagccataaagaagtagcatagtcattttaaaaacaaattgaaagagattcttacctgttaaataacagctgcaaaaggcccgacgtattaccaagtacacgtaagttatcatacgtaatattcattttttgaagtatttcacaaaatccaattagaaaaataggtgggttatctaattcttcacaccactgcagtgaataaagcagttctgcaactaaaagaagagacagcaccaaattatgaaaagcactctgtgaacaaacccttcaattactttcacttctccaccttgttttctaacactgttgtgcccactcatctcaaaactcctatgaactgatttttcaaatctgctttgagatgttcaaggacaatgaaaactgagaatatatgtctgatacaaaataccacccttttcccaaattctacttggtcctttttctaattagttaagaatgtgacaagaacctaagttactagagatactgaaagaatcttcctaccattttggcacaattggtaaaaagttccagacaggaaaaacaactaagggacccaagacctgaggtgagaagttcatggcaaatgggagaaatgggagacagtatgatacagtaaaaggacatgaggcctcaattacagattggggtggattcaaatctgcatctctctctcaagctatataaatagttatcaattaggatactacgaactacctcacaggactgctgtgataattaaatggccaagtatctatcataaagcctggtatatcataggtttctaatacacagtcacagctcccttttataaagccatgtatagcttttggagtcagaagcattgtgacctggttcaaaatctaatcctacacttaccagctaagcagctctaatcaagtcatggtaacaaaaacaacaataatatctgactaatgagctcgataaaattaaagaaataatattgccaatttgtaattagtaacacaaaaaattattactctacttactagttttggatttgcacagattcaccctgtgagcaatgttaaactacaggcttgtttcctttcccttaactaaatgtgaaggtggctgcccaaaagaggtgtttcaactttcttccacagagcatatattcccccttctagtaactgtgttacagctgagggcttacaaacaagactgatacagggtttctgcaaattctctacctttaataccatcttgtaaaagtcactccaccacctataattctaaaccatttgttgaaacagggaaatttgctgaggccctaagtcctcttagggttcaacatttgaacgtccacttgccagaaaaaaaattagagcccgatgaaatacaaaagtattcaaaaccattggaatcaaaacagcatggtatttgtataaaaacagacacacacagaccaatggaacagaactagagaacccagaaataaatccacatatttgcaggcaattgacaaagtcttcaacaaaaatgccaagaacatatattggggaaaggacatcctcttcaagaaattgtgctaggaaaactgaatattcatatgtagaaaagtgaaaacagacctctatctctcaccatctaaaaagatcaactcaaaatggattagagacttaaacctaagaactgaaactatataaaacaactagaaagcatcaaggaacgctataggacattggtctaggcaaatatttttatggctaagacttcaaaagcgaaggcaacaaaaacaggcaaataggactatgttaaactaaaagctttctgcacagcaaaagaaacaatcaacaaagtgaagagacaatctgtagaatgggagaaaatatttgcaaactattcatccaacaaggggctaacataaggaatatataaggaactcaaacaactcaacggcaagaaaggaaaaaaaaatcccatgctcaatattagtaatcatcagggaaatgcaaatcaaaaccccagttagaatgcctcttgtcaaaaaggtaagaaataagctgggaatggtggcactgcttgtaatcgcagcactttgggaggctgaggcaagaggattgcttgagcccaggataaagacctgtctgggcaacatagtaacaccccatctctaaaaaaacaaagacaaaaaataacaaatgctggcaagaatgcagagaaataggaacttatatactattggtaggaatgcaaattagtacagccattttggaaaacgatatggaagtatttcaaaaaactaaaaatagaactatcacacaatccagcaatcccattgaatatttagaaaaccagtatatcaaaggtatatctgcacccctatatttgctgcagcactattcacaatagctgagatatgaaatcaacctaagtgtccatcagtgaatgaatggatatataaaatgtggtacatatgcacaatggaatactattcagccattaaaaaaagaatgaggccaggcacggtagctcacttctataatcccagcactttgggaggctgagacgggcggatcacgaggtcaggagttcaagaccagcctggccaacatagtgaaaccccgtctctaccaaaaatacaaaaattagctgggcatggtggtgtgcgcctgtagtcccatctacttgggaggttgaggcaggagaatcacttgaacctgggaagcagaggttgtggtgagccgagattgcgccactgcactcaagcctgggcaacagagcgagactctgtctcaaaaaaaaaaaaaaaaaaaaaaggaatgaaatactgtcatttgcagcaacatggatgaaactggacatcatcatgctaaatgaaataaaccatgcacggaaagacaaacatcacatgttctaatttgtatatgggagctaaaaaagtggatctcatgaagatagaatagtatagtagactgatggttaccctgagaagggtcagggagagcaggggatgaagagaggtcggtgaatgggtaccaaaatacagtgagagagaagatatatgacctagtattcaataacacagtaggatgaccatagttaacaatgatttatattgcaaaataactagaagatttgaaatgttctcaacacaaagaaatgataaatgtttgaggtgatggatatcctgcttagcctgatttgatcactacacattctatgtatatatcaaaatatcacatgtaccccataaatatgtaaaattatcaggtatcaatttttttttaatcaacagaaaattctgaatccttgataaaacaccaaagcctcacccattttctttagggtatgtgccacaggatctgtttacattgatgtcatgacagcctgagtagctaacaccaaattacgatccacagttaacaagattatagcaagattccaatatattcgtatctaatttgcaatttcacattcaccacttaagtaacttcaaggttctcatcattaaaataggaaaaagaaagctgaagattcttgaattaaagatttaaactgcagtataatcaagattatttcaaaattatattcattcatgcattatgttatatgtaaatactcatatatacttacttattttctcaagctcattattttctaagactgtttcctttctcagtgcaattaagaccattttgctcaataatgctgaagtacacaaatggctgggaagtgtctttatgtcctgttccttaaaatctgttttgaaacattcataattcaaactcaatcttccctctaaaagaggtctatgtaaccactgtgaaaagaatacgttatatacaaaattatttattacctaagcaattgagactgaacaaaaatgaagttgtgagaatatttattaccaaaaccacagaaacctagaagtttgttttcttttacaggaaattatcaacatgtgtatttctttaagactccttaagtacagaactaggtcctaagtctttgtaccatgcccactgccactgtcaaatggtgtcttgcaaaaagcaaacatccagtatatgagcatacaaagacatcaaagcaaagcaaaatactcattttatttatgtttttcttccccaaaataaaaatattcaagcttgcatgaaatccaaacttcagaatgagatatgtactcttcaatttccaaaatacctgcataggaagagactgcctcatcttttcccattcactgtcgttcggcattacacttccaatataaactcccataagataagaatcttcactctctagaagtgtatttagcaaatcatcaacagcagacaagaggacttggagactaaaaataatgcagagaacttaactgttgtagttacgctatgactagtttgaataccccaatacatattaaataccctataatagctcacctgaacaaaaagaaatgatgaaaataaaaagaggtaagtgacattcccccaccgatgacacaccaacataacagtcaaactggggaggtaatccaatatttatcatttgaaatctagtgttgcttcctatctatctcagaatgaagaggacctgacctatttcagaccaggtatttcagaaatacagctaccttatgaaatgcagcactattttacctaaacccaatatcctctaaatgcattctctcttctcctttattatatggatttaggtatgagaggtaaaatatacttgcaattcaacatcttaaaacactgcctacctgtccccaaaaaataaataaccaagaacaatcagtacatgtggtgaccatgagaggctacaatgcacaccagcctatgacaaaggatagtatcaccatcactttactgtctataagttatgagtccagcaggtatgttatagcaaattatccttcaattaactggcagtttaaatggatggtcattgaaacaaaatggttttggaaaaattcgtttgggtcttttcataagagtcctgtagatttgttacctaacaagtcacttttcatttctcttttttttaagagatggcatctcactatgttgctcaggctggtctcaaactcctggaggtctcaactgatcctcccacctcagcctactgagtagctgggattatagggacgagccctacaagtcatttttcataggcactcacactgatcatggaatctaatttaaggacactgttcaagtataaaagagacactgaaaccaagctcaaaaaaggttacctgttgatatccaaagatgaagcctgaacttggttcttcagccacagagcagacaaatgtaggaaggtactctctttatatgaactgtcagtttgatgaaccaataaatttacaccagagagccaagtatttttcagtttacagataagaaaatctaaaatcaagatgtcaacaggaatttgtaatctcactgaattaactctcatcagcacaaaatgtttgaaacaactctacagatctgagatttttttaaataccatttaaaaaagaaaaattttaaattgccattcaaaattcaattgccaaacaaagcaactgtgtcataaacatgcaatcatacaagctagcacgtatcatataaatgtaaaatggtaagatttttaaagttacattttttatgcttgaacttatttacaagagttgtccttttggagacatttttaaaaaaattattacaccatttccaaatacagaagttagtatttaagaaagggttggtagccaatgatgggcagaaaaaaaagagagagagaaagaggaaggaagaaggaaagaaaaaaagaaaggaaagaatgaagggtgggaggaggagagctctctatagatagtatttttttatgttcctttcacaaataagtctgaattagcatataaggcaagaatatagtccttaaaaagataatttcaattctattttgatatacaccaaagattgaatgtttttactataataaagggatattattatcccccttttacaaatgaggaaactaagacatcaagaaattaaggaacatgccagaactactgaatggactaagattccacctaatcaattatggctcattccaaatttctttgaatatcaagtgagatctttagaaataacatctacgtacatctttaacttgctttctagagctgaaagtgtttaagactgtagccctttactcaaaatgctttaaactttcaaacacattataattcaattaataaagcctgggcacttacactcactatgaaggtcagagccggagattcccaacaaaacatttgagcagtaggctattacctggcaaatgtgttttttctttgctctgagcacataactgaaagagagttaataataaatcttcagatgatggcattagcaagcatcctttcgctgagctgaaatagttataggccacatcacagataaaagacactgatgagtcactgctttcagcttctgataatttctttgttttgaataaagtttcatgaagtctaacaatgattctttcaacatatacgtctccaatcaagtaatctggagaaaaaaaggttcaaacagacaaaaaataaaaatattaacgtgtatttttaaatatcttactttggattaataattctatgggtctttcctggattttaaaatgtattagacaaaattttatcaacaaatcaacacattctctcacacataaaggccctcaagtaaaaaaggcagttttaaattaagtagaaaacagaaatggtctacagttagggtgagcaagtttgtacactgaaaaccctttaagtcatgagtcaactttatgagctaaaaaaaaaaaaccctttaggatatagaactaaaaatattaaatatcttctaagtcatggtatgaagattaataaacaattagggtgcttacaatattacgatatgtaaatgagctgggcgcagcggctcacgcctgtaatcccagcactttgggaggctgaggcagacagatcacctgaggtgaggagttcgagaccagcctggccaacacagcgaaaccccgtctctactaaaaatataaaatttagccaggcatggtggcatgcacctgtagtcccaactacttgggaagctgaggcacaagaatcacttgaactcagatgttgtaagccaagatcacaccactgcactccagcctagacgacagagggagactcagtctcaaaaaaaaaaagaaaaaagaaaagaaaagaaaaaaaaaaatttgaatgagtaagtcctgttatttttaaccaataacacataagctgagccccatgcaatcccccacaaaggagaaatggactattccccattagaaaacaaaagccatatttgtcctaccatttttaacatgttgggataataccaagcttagaagagtccatctttctgagaagtgagattctgaagataccctggattccaagtcctcattacaaagacaatctgccaagttgaccaatttctcaccaaggatatcgcctttgagccaaggagttactaaagcatgtttatctgaactaggacatgcctaaaaccataaaattaaagcaaagattaacagcaagatcaaatactctctctgtccaaaatattacttgtaccatattactatcccttcgttatcatggctccaattctatcccccctcctcctcctcctgaagttctaggaagactggtatcctccctgttccccattaagcctgtatgatgttcacttccacgctttgctgttaccttcccagccataaatattcccccaccccccccttttttttttaacttaaaatcccatccattctttgaaaatcagtacaaatcccacctactttatggagtctccccatccactccagcccacaatgatcactgcttttctctgaatttctaaagcacttactggattgtataattatttaaatgtttcatctgtgtatatcttgtctttccaatgagattgtaagttccttgagagtagagactgtcttaaacttctttgatacctgctatcaacactgtagatatgttcaatgaataatgaataaactttgaagatagatttataaatgctctataaatttttgttcattaattttgctaaaattaaagaacaattagtgtataataatggtaaattacttcaatatgaacaatgggatttatttccccaaattctctgatatagagttactagggccagatatctgacagcaacttattttcatgaggtggggaagcaagaaaaaaaaaagctgtaaatccacccctaaagcatgctgatccatgttcccagagcttcttttgctttaagggctgagaagtaaggaatttgcaacttggttcatttcaaagcaatctggaagaaaaaaaaaaatccaagtgcagattgggtagtgcttggaaaactttatccttttatttaaaaattgtaggtaaccagagcttatattttagtccaagctttatcactaactagcctatgaccttggacaaatcttttaatcagcgtgggcctatctcctaatttgaaagttggaaagattaacttagaaaatctctaaggtccttttctggttccaaaactcaaatctgttttttaattgatggtttttttaaaagatgactttaagaccagcctgaccaaccaacacggtgaaaccttgtctctactaaaaattcaaatattagctgggcatagtggcaggtgcctataatcccagctactcgggaggctgaggcaggagaatcacttgaacccgggaggcagaagttgcagtgagacgagatgttgcaactgcactccagcctgctgggcaacacagtgagcctctgtctcaaaaaaaaaagatgattttaagactctgctcataaagtattaaggttccataaaacaagaaaaactactttagagtttagatggctgtgatacctgttttcccagtgtagtttgccaagtaaaaccaatctattctgcagaatcctggtaaacaaaataaacttctgaataaaatgcctctcgagttagcaagataagaaattcaacataatgtacaggcataccttgttttattgggcttaatatttactgggctttgtaaatgctgcaattttaaaaattgaagatttgtggcaaccctgcattgagcaagtttattggcaccattttacaacaatatatgctcattttgtgtctctgtgtcacattttggtaattctcacaatatttcaaactttttcattattatgtctgttatagtgatctgcaatcagtgacttttgatgttacgattgtaatgtttgggggtgccacaaaccattgccatataagagggcaaacttaatcaacaaatattgtgtgtgtgttctgactgccccgctgaccgaccattccctaatctctcttctctgtccttaggcatccctattcccttagacacaacaatgctgaaattgggccagttaattacactacaatggcctctaaatgttcaagtggaaggaagagtcacacatctctctaaaacaaaagctggaaatgatgaagcttagcaaggaaggcatgttgaaagccaagacaggtggaaaactaggcctcttgtgccaaacagccaagttgtgaatgcaaaggaaaagttattgaaggaaattaaaagtgccactcctgtgagcccaagagtaacagaaagtgacatagacttactgctgatatggacaaagttttagtggtccagacagaagatcaaacgagccacaacattcccttaatccaaaaccgaatccagagcaaggccctaattctctttaattctatgaaggctgagaggtgaggaagctgcacaagaaaagactgacgctagcaaagggtggttcatgaggtttaaaagaagaaaccatctccacaatacaaaagtacaaggtgaagcagcaagtgctgatgtagaagctgcagcatgttatacagaagatctagctaagatcaataatgaaggtggctacactaaacagattttcagtggaggtaaaacagtcacatattagaagaagatgtcatctaagactctcatagctagcaagaagtcaatgcctggcttccaagtttcaaaggactggctgactctcgttaggggctaatatagctggtaactttaagttgaagccaatgctcatttctcattttaaaaatcccagggttcttaaccttatgctaaatctactttgcctgtgctctataagtggaataacaaggactaaattacagcacgtttatagcgtggtttattcaatatcttaagcccactgttggaaaaacgaaggaaaaaaagaaaaaaattctacaataagtagaaatattactactcattgacaatgcacctgggtaacccaagacctctgatggagatgtacaaggaaattaatgttgttttcatgcctgctaacacaacatccattctgcagcccatgaatcagagtaattttaactttcaaatcttaatatttaagaaatacatttcattaagctatagcagccatagacagtgattcctctgatggatctgggcaaagtccactgaaaaccttctggaaaaaactcaccattttagatgccattaagacattcatgaaccatgggaaaaggctaaaatagcaacattaataggagttgagaagctgattccaaccctcatggatgactttgagaggttcaagactttagtgtaggaagcaactgcagatgtggaggaaagaggcaaagaactagaatgagacatgaagcctcaagatgtgactgaaatgctgcaatatcataataaaatgtggatggatgaggagttccttcttacagataagaaagtggtttcttgaggtggaatctactcctggtgaaatgccgtgaacattgttgacatgaccacaaaggatttataatattacataaacttagatgatacagcagtggcagggtttgaaaggattgactccaattttgaaagaagttcttctttgggtaaaatgctatcaaacagcatcatatgctacagagaaatctttcatgaaaggaagagtcaatcaatgcagcaaactgcactattgtccttattttaagaaattgtcacagccactccagccttcagataccaccaccctggtcagtcagcagccatgaacattgaggcaagactctccatcagcaaaatgattacaactcgctgaaggctgagatgatcattagcactgtttagcaataaattaattttaaattaagatatgtacattggttttcagatataatgttattgcacacttaatagactgtagtgtacacataacttttatatgcactggcaatccaaaatacttgtgtaacttgctttattgctgtggtgtggaactgaacttacgatgtctctgagatatgccagtatgaacatatctaatgaaagaagctgcctagctgtaaggagatgaggaggctagtgagtcatggaagcgcaggcagcaaacactggctaggaacttccaatcactgctcaggaagaggattttcttccacacagatgtgagtatttgcacttcacggcaggtacattcctaagttggaaatggatacattagtctactcttatcaaattatttgcaccccctgctctgaatcaaggcttatcaaggagctttctgataatttagctcttcatgtaacttggctacagggagagaaggcactagataaactaaggcaaatagtgtgcctgataagtcatattcctcattgaaaaataataaatattctgtatttattttgtaaaaataaaactatggggaaaatggggagttactgtttaatggatacagggtttcagttttgcaagatgaattaagttatggaaactgcacaacgatgtaaatatacttgatgctactgaactgtacatttagaaatggttaagatggtaaatttcatgctatgtgttttttttactacaatttaaaaaatagaaaaaaacttgcaaattcaagagttagctatgaaaacagaaaaataatttgaaaatgctttaaaaaggagtaagaatttcaggtagctagtcataacatctctacagttggaaaagtgttagttataacatttacatcctcattaggaaagaatacttaagccgttttgaaaatttgtaaattgtttatgttctttcatttcttttcattattcttaccactaattttcttagtcagtggcaatcacacaaagactggaagatttttatttacctacatagtgttccagagtagagaaaacttaattttctcatgtgttctacccaaagctagaacctccaatccatttctgcagtagaaaaagtaactagaataacagcagaaagttgtagctttaattaaaagataataaaatgtttaaatctgcctttgttaccttctaggaaagaaacactggattttccagagcctgttcatttttccctaatattactaaccagaaaaatactactacaggaaaggaaaagaacaaatatcttcccacattataggaagaaagttacaataatgaggaagttctctaacacagaacctgactatctgaccatatttattgtgtaaataggactacggttataatatttctattcccataaatacaaaaaaaaaaagaaaaaaaaatccctaagataccttttcaataatcttaagaagagaattccatttcaagtccacctgaaaaaagaaaaagagttagaaacaatctgctagaacaactttttgtttgagatggggttttgtatgttgcccaggctagtctagaactcatgggctcaagccaatgtctcacctcagcctcctgagtagctgggactacatgcatgcgccaacatgcccagctaaaacttttaaaaagtaaatgaagtacccatgtaaccaatacaaaactaaaatgttcttatccaactttttaaatgtatagattaaaagaattcaccttttaattacaagtatttgtcaccctggtactgctgaacatctacccagcagccctagatacttcccaaatcatgatcaagaatatattgcttgtcctaaaattgacactcacagtgaagaaacaaccagaaaacaataagcaggctcattctactcatctattattcaaatagtttgaaaagatatacaacaggaataccttggttagatcatccaagactttttttctttccatatcattgtcacagcaccggagagcactgtacaaaatgtccaccaggaaaccaaaatccttcctttgatcttcatttagccaacctatcagtttctggtataaaaactgcaccgcaggatttttttgtacaagcttggctatttcaagaggtttggcttggacaatactctgtttttcatcaccaagtagcattttaaatactcggcttgaagaaaaggagtcaagcagagtagaaagaaaccttagatgttgctctgactttcgttcattgacataattaatacttatatctgcgagtttacagactaagtcttccaaaggttttttccttagaggagacaaaaggcctgaagaattatgagtgagagaaggttcagttgttaattcccagccttcaatcttctctccttctgaagatacacatttttcattctctttattgctttcaagtatctcatcagcaaatctaaccttaccatttttttttttacttgacttcaatgagctcttcggcttctgaagcacctgtaataggttagatacacccaaaacggactcaacatcagcttctggctcactgattttcgcaacacagatctctgacagtctttcccagaaatgtatcagtacgttctccaagttgtgagctgttttttcatctttttccgtgtctgctttggcttcccaggaacttagagtttctgctaaatggttaaatagctgcccatgttgcaatcctgggtctttgagaactgcatcaataaaagggatcaactgaaagaaaaggtagaatatcataaaatatatatttggtcttcaacccccatctcctggcacacaactctaaaatccttggaatctccaaagtgatatcatttcataagctaatgggttgattgatggctggcagcacctgtatagcaggatgggggctgatcaccagaaagaccaaggcaggattaaagggctagaactttcaatacctccccaacctccagggatagaaaggtagctaaaggttaagctgatcaccagtggcaattacttaatcattcatgcctagtaatgaagcctccataaaaacgcaagaaagacagcattcagggagctttcagatagctgaacatgtggaggttcctggagagtagcgcacccagggagggagtggaagttcttcaccccttcccgtatctcaccgtgtgcatgtcttcatttgtatcctttgtaatatcatttataataaactggtaaattgtttctctgagttctgtgagacagtctagcaaattaagcaaaccccaggagggggtcatgggatccctgatttagatgtacagctggttggtcagaagcccaggtaaaacagcctggggcttgcgattggcatcagaagtggggagcggtcttgtgggactgagtcctaagccagtgagatctgacactatctccaggtagatagtcagaattgaattggaggacacatagctggtatctgctgcagaactgactgcttgctgggtgggagaaatctccacatatttggtcacagaagtcttctgtgttgattactatgatgtgagaatagaggaaaaattgttttttccactcacagaaggtaaaaaattgaaaagttcaattttcaagagaaaatttaaacaaagtatttgtaaaacactatttcatatttaataactgaaaaacataaattttcccctagaactctgaaaaagttaacctaaagatccctttcatatcatacaagagcttaatgatttcacctcaattattcctttttcatgataaaattgactgggattcttggtcattaacaatctagttttctttgcatcttctggatttaagtgttttgcttttctgccttaactataggcaaatctaagatatgagactataagtcaacatgaaagatacctaggacccacagagtgcggaatcctatttcctaaattacaaaaataagggtagagacatcctaagacctgggcttctataatctcactaatttcctactgtaaagaaccatattccataaccttctctcatctctggttctaaaagccaagccaaactttcacaaagcataatttgagtattttagaattaacaagatgattgcttcatgatttatttaaacttactacaaaagatcataaatagcaacttcaaaattctgctttgcattacatctttctttttttttttctgagatggagtttcactcttgttgaccaggctggagtgcaatggcacaatttcggctcactgcaacctctgcctcccaggttcaagcaattctccagcctcctgagtagctgggattacaggcatgcaccaccacacctggctaattttgtatttttagtagagatggggtttctccatgttggtcaggctggtcttgaacccccaacctcaggtgatccacccacctcggccttccaaagtgctgggattacaggcgtgagccacgacgcccagcctgcactacatctttctaaaacagggttttacaggccgggcgcggtggctcacacctgtaatcccagcactttgtgaagccgaggcgggtagatcacctgaggtcagcagttctcgaccagcctggccaacatggtgaaacgccgtctctactaaaaatacaaaaattagctgggtgtggtggcgggtgcctgtaatcccagctacttgggaggctgaggcaggagaatagcttgaacccgggaggcagaggttgcagtgagctgagattgcgtcattgtactccagcctgggcaacaaagagcgaaactttgtctcaaaaaaaaaagggatttttgcatccagacactgattagtttcttaggtatcataccatgctagcaactgagagtatggaatttttacttatctggtcagaaatacacatcactcaattggtaaattataaaaataaaatttttacaaggaaggcttattactgtaaatggcaacaagacacaatgagcttgatcctacataatcagtatgcaaagagactgacgacttttacattatagatacctgatcattgacgagcatctgttcaatctcttcctcacctaagttttgctgcattataaaacgtaagcattcaaaaaaagcagatattactgccgaggactctaaagagctggttttagttctctctgttgacagcctaagaaataattaataactggattactctttcatgaagaagaaacaagaactcagaattatcaaaataaagacctcaaaaaggcatcatgacagaagaaacatttttaaagcagtttcttaaactacaaattaaataccaatgaaaatacatatagcccaatgagaatatgaacttaaaaactttgaaaaagtttttcaaaaaatgtatcagtaaaaaataaaaataagagaatatttcctttttctttttcttctttttttttagaaatagggtcttactatcttgaccaggctggtcttgaactcctggcctcaagcaatcctcccactttggcctgtgctaggattacagctgtgaggcaccacgcctagccgagatattaattttctattcatggaccaatccacctgcaaattcgagataacttattaaccaaataaagataatggtgtagtaaaaaaaatctgtaatcattaataaaatgatgtatcttctaagttcaacaaatgtactgaaacagtttttttaagtgtgaatttaaacatctatagtagttaaagttgttgatgttttaaaaatttcactggctaattttctgcatttaggcatttgtatttatcaacataaaaaataaaaaatggctacatgtgtctgtggtgcaattggttagcacattctgctgttaaaaaaatggctaatttgaaaaatagcctagttgacctatttccaacaaggagctttaccttatttatctaacttcctgctgtgtgctaccactgaagtcttgaacgtactcaagaaaaaaatatcaattgtaattctctgaaaactttaaaagtatttaatgaatagtaaaacaacttggagaaatttaagtaagaaagaaaatgagtataaaaacaagaaaatctgttttgttttaaaaatcaaaaatttaaattacttacccagcaactagagacgtgaggaaatttttgaagaaatccaactttggatttgtgatggactgagggagcttgctgatgaatggcagaaggtaaggatatatgacagtagctagaccccgaccaccttcacgaatcacagttgatagcttgggaaacacactcttttttgcatttacatgaagccaacagtcctaaccaaacaaaagattatagtagtaattagagatcataaacatacttttctcaattaaaagagaaaacatataggctctcaaaaagaaaaaccaagtattttacctaaaaaaagctaaaatctttcaccaccattaaaaactaaaactgaaattataaatgtattacatataatgatcatatattcgacatgcttacaataaagtattgattagaaataattatttaacttctatttctataaaagctgctttctaaaagggacaattatatttcaatcttaattatatttcatcttaaatataaaattcagttatggtgactgcactaggacacataaggtttaaagaataattaatactggcaaaacaaaataaaataaaaactctatgccattttagtcactttaagatttatgccaagtttagattattttatttccaagaaagcattttcccagtaagttttggatattcttatctcataggttcattcctcagtgtactaaatgtgcctctcttacatacctcaatagttgtaagtgtatagagtacagcttcccagagagctgggcagacaattgggtcactgtcatcaatgctaagtagaactgatgggctcactttggatgcttcctctttcatcaactgtggaatgcgctggcacaatgcagagactaactcaaaataagctgagcgaatctaaaagaatgcaaagctgaattaaattaaaacctagtaaaacttgataagatttttaatttatggtaatagtagattattcacactaaccctcccactaagaaaactaaaatagctagaaaaaatactttttaaaatcttagagtatgaaatggctgaaaaggcataaggaattaccaaggcaaaagtgaaggctgaaagaattaattcaactttctctttctttgactgaagcaaacacaaatcctctttagtagcagaagccttcatttggggcctccattatagccaaacaaacagaaaataagacaccatgagcaacaatcaggagaaataaaagatctgagactttaaatcttagaatgatcagtcacaaattctataatacaatgcttattatatttaaaggaacaaaagttttaaaaaacttgtaagaaaaaggatcctggaaaaagcagagcagatcggaaaaagatcaagcacaattactcaactaaaaataattaaaacttaaagctcaactcgtagtttaagaacaatgcaatggtctgaatgtctccctccaaaattagtatgttgaaacttaatcaccagtgtgatagtattaagaagcgaggactctaggagatgattaggtcttgagagcactaccctcatgaataggatcagagggcccttacaaaagggtatgagagaccatgtttactccttctgccatgtgaggacacagcaaaaagtagccatctttgaaacagagaaagcaaccctcaccagacactgaatctgctggcaccttgatcttgaaatttccagcctacagaaccgtgagaaataaatttttattatttacaaattactccatctaaggtacagtttatcccttggtacctgcaggggattggatcaaggatatcccaccctcccacccccacacatataccaaattctcaggaattacataaaatgtccctgacataaaatggcgtaatatagtcggccctccatatccacgggttcctcatctacagttgattgaatccacacatgcagaacctgcagatatggaaggctgactgtattttgttaaagtagcctgaatggactaagacagctggaggttagatacaaataagagagaatcagtgaactagaagaccgagcaaaagaaattatccgcaaagcatcatggagagacaaaaagatgaaaaacaacaaagaaaacgtaacagacataggggataaagtgaggcttaatatctatttaatcagaatcccaaaacaagagaagaatgaggaaggaaatacctagagataatagctgagaattttacagagccaatgaaatacaccaagtcaaagattcaaaaagtccaacaaatcccaagcaggatacataaaggaaatccacacaaagacacattatgcaactgggaaaacacaaggagaaaagtagcccaaggagaaagataaactaccttcaaaagaaggacaataagactgatagttaattttgacatcaataatttaatcagaagacatggaatagtatcttcaacacaaaaataactaccaacatacaatcctgtactcagcaaatatgtctttcaagaatgaggatgaaggccgggcatggtggctcacatctgtaatcccagaactttgggaggctgaggcgggcagatcacttaaagccaggagttcaagactggggtggccaacatagcaaaaccccatctttactaaaaatacaaaaattagccaggcatggtggcacatgcttgtaatcccaggatttgggaggctgaggcacaaaaatcacttgaatccggaaggcggaggttgcaatgagcccagattgcaccactgcactccagcctgggtgacaaagcaagaatccgtcccaaaaaaaaaaaaaaaaaaaaaagaatgagggcaaaataaaaacaccttctgacacaaagcaacaaatatataggcaaatgtaaacaaagattgagagtataatattttgtgagatttaaaaatacatacatatctaaccccacaaaatattttatgtatattttatataaaatattaccaaatcaaagttagcaaagtattttaaaagacatgacatttataaagacagcaaacttctagctatgccaagaaactttgatcataaaacatcagaaaaatcaagaaaattttgctttgcttagaaatcaagcattcattcatgaaagaaacaaaaaccataaggactgagcagattgtaaaacattattctagaatgcaaaagacctaagataaccaaaagaattttgaaaagaacaaagttggaagttttcaacacaatataaaacattcataatcaagtgcatggtattgggtgtaaggatagacatacagatcagtggacagaacagagtctaaaattaaagttgtacatatacggtcaagtgaattctgacaaagatgtcagaataaggatgggatagtctttcagcaactgaatactccataaccaaaaaattaattttgactctcaccttcagtttatatgcaaaaaaaacctctaaatccactacatggagctaacctataaaacttctaaaataaaatatagaaaatctttgcaaacttgggcaaagatttcttagataagacatcaatctattaactggccattcaaataataaaaataaaaaataagacatcaaaaagcacaaccataaaagaaaaatgatcaattaagcttcatcaaaattaaaacatctactcttcaaaaacactaatgaaattaaaaggcaagccatatactggaagaaatcattcatcatacttttatctgacacatacttctactcaggataaatacagcacacttgcaactcaaaaataaccaaactgcaattttaaaatggaccaaaaaatatggatgagtgagagcccaatatatcagtcctcctaaaaaggaagctctgtggataaaacacacacaaaaaacaactacctgaggactctggagactgaaatacagatgcattttagaagagaatcaaactgggagtaagtgatccatgtagattgagatcccaacttttgcagctttgcccaaacgtggctgtggtcgccatcacaaaggcacaggaccagctacaacttcagtagaaagactgacatctttctggccagaggaactagaagaaccaggaaagaaggccaggataatgcgggatgacgcaggagagtgatgggggactctagaaaggagagggccacagaaaggaacccctatattctgtattttaacagcctaaatctatagcttatctctgaaccatgcatgtgcactccactatgcccagctaatttttaaaatttttttagagatatgagtctaactatgttgtgcaggctggtcttgaattcctggcctcaagtaaactagaagcagcttaaagctaaaacaagaaatgaactgagagctaagccatttcccaccacaggcataatggtttggtatgggtctaatcaagttaactgcctcctaacaaaaaaaaaataccctttggataaatataaaataaaccagtctccaaaacataacattcacaatgtccagtatacaatcttaaattagtcaacataccaagagccacaaaaatgtggtctcatcacaaaggataagacagttaactgatgtcaaccccaagatgacccagacgttatcagacatggattttaaaaagctattaaaactatactcaataaggtaaaggaaaatacgatgaggatgaatggggaaaaaatagacaatttcatctaagaaacagaaaatataaaaaaccaagtggaagttctaggaataaaaaatatatgaaataaaaaataagcaaaagattacaacagacacctccaaaaagaagatatacaaatggcccataaacatattaaaagatattcaacatcattagtcatcagggaaatgcaaattaaaaccacaatgagaaacctctattccagaggtcagtaaacattttccatagggagatacagagtaaatatattagggtttgcaggccatgtcatctctgttgcaactacttagctctgctttgtagaagtaaagtagccatagataatacataaaactatttacaaaaatagatgtttccctcgtgtccatggggatgaaaaaaacaaaaacagatgtgccagatttgacacacgagctattgcaatgcctgatctcatacccaggagaatgacctaaattaaaacggctgacaatatgaaacatgaggatatggagcaactaaaaatctcacacattgctggtaggagtactacaactttagaaaacatcttggtagcttcctataaacatatacttaccatatgacatatcaattcctctccttactcaagaaagataaaaacatatgttcacacgaaaactgtacaaaactaaacaataaaatggactgctgatatatgcaacaacatgaatgaatcttaaaacattacactaagcaaaagaagctagatagagagtaatgcctagctccatttatatgacagcatagaaaagacaaatctaatctgtagtgatgggaggcaaatcaatgactgcctgggataaaggcagaggatgacttggaaggacaaaaggaatgcattttgggtaaaaaaaaaaaaagttctatttctttattgtagtggttatataagtatatatacatgtagacaggtgtacacatctgtcaaaacttaaactataaaaatggctgcattttacaggactgtgtgcaaattatacttcaaaaaagttgattttttaagaattatcataggatattttaaagtacccaaataacttgagagaggccaggcatggtggctcacacctgtattcccagcactttgggaggccaagcctggtggatcatttgaggtcaggagttcgagaccagcttggccaacacagtgagaccctgtctctactaaaagtacaaaaattagctgggcatggtggcacgtgcttgtaattccagctacttgggaggctgaggcaggagaatcacttgaacccaagaggcagaggttgcagtgagccaagatgacaccacggcactccagtgtgggcaacaaagtgagattctgtctcaaaaaaaaaaaaaaaaaattgaaagagatgagaagttcatggataggaagactcaacaacataaagaaagcaagtttctccatattggtctataaattgagtacaaccacaattaaaattctagttagacgtttttgagaaattcaacaaatgtactggaatttgttttgttgagacaggatctcactctattgcctaggctggagtgcagtggcagtgcaatcaaagctcactgcagcctcaatctcccaggcccaagtgatcctcccaccacaacttcccaagtacttaggactactagcactccccactgtgtctagctaatttttttacattttttagatggggtctaactatgtcatgcaggctggtctcaaactcctggcctcaagtcatcctcccaccttggcctcccaaaggtctggagttacaggcatgagccaccacgctcagcccaaatttactgaaatttttatgaaagaataaagttctggccaggtgcagtggttcatgcatgtaatcccagcactctgggaggccgaggcaggtggatcacctgaggtcaggagttcgagaccagtctggccaacacggcaaaaccctgtctctactaaaaatacaaaaattagctgggcgtggtggcaggcacctgtaatcccagctactcgagaggctgaggcaggagaatcgcttgaacccaggaggtggaggttgcagtgagctgagatcatgacgctgcattccagcctgggcaacagagtgagactccatctcaaaaaaaaaaaaaaaaagaatacaacccaaaatatgtgactaacctgagcaggtattaggacatatcataaggccaggcacagtggctcatgcctgtaatcccaaatgggaggctgaggcgggcagatcacctgaggtcaggagtttgagaccagcctgcccaacatggtgaaactccatttctagtaaaaatacgtaaattatctgggcatggtggcaggcgcctctaatcccagctactcgggaggctgaggcaggagaacagcttgaacctgggaggtggaggttgcagtgagttgagattgcgccactatactccagtccaagtgaccgagtgaaactctgtctcaagaaaacagcctggccaacatgacaaaaccccgtctctactaaaaaatacaaaaattagccaggcgtggtggtgggcacctgagtgccaagctactcgggaggctaagggaggagaattgcttgaacctgggaggtagaggttgcagtgagctgagatcgtgccactgcacttcagcctaggtgacagagtaagactctgtctcaaaaaaaaaaaaagacatatcataatgtcatactgacagtggcactggtataacaagaaacagagaccaatgcatcagaacataatttagggcaaatttctgaatgtatgatttttttttttaataggttcctgctcttcccctaggctggagtgcagtggcacaatcatggctcgctgcagccttgacttcctgggatcaagcgatcctcctgcctcagtctccaagcagctgggacaataggggtgtgccaccacacccaactaattttttaattatttttttgtagagacagggtcttgccatgttgtccaggctggtttggaactcatgggctcaagtgacccacctgccttggcctcccgaagttctgggattactggcataagccactgtgcccagcaatatataagaacttaatgtcttgtaacggcatgaccacagatcaacagggaaaaaaaataaacagtttactaggtaatgttaggaaaactgactcaccatatatgaagaaaaatgtaactagatctatacttaacaccaaatgaaaaggtagattattgatgaagtgaagattttatatgaaaggtaaaactgcatataaagcctacaactataaagctaaaaaattcaaaatataagaatatctttatgacttaaaggtgggaatagccttcataaggcaaaaatcagtgactttgatcacatcaaaattttctttctgacataagacacatgggagagatgacagaatgggagcttttttgcattgcctaaaaatgacaaaagataatctgtcatgagattagaatttttaaaaaagacaaaaagactaatatttaattataaaagggactcctgcataaaaagaaaaagagaactccaaagaaggaaaaatgaacaagaaacacaaaaacaaaaacgctaaaaattcttgaagagatgcaaaatcaccaataaggaaagtaattccagttaaagagagatatcacctgaattcctattaggctgatgaaaaattaagcagctgaatgttgcctactgaaggctagaatacaaggttatgtagtagcagctgaatgttgcctactgaaggctagaatataaggttatgtagtagcagctaaatgctgcctactgaaggctagaatataaggttatgtagtagcagctgaatgctgcctagtgatggctagaatataaggttatgtagtagcagctgaatgctgcctagtgatggctagaatataaggttatgcagtataagagtcatcacgtattgatggttgagtctagagtaatgcagcccttcaggagagcaatctggcactattttaggaaattaggtatgcacacacttcactgactcagcaattcagataatttcttaagatccaaggacacatgaatgaagatgttcattgctgcattacttgtgaaggcaaggagttggaggcaatcaggatctatcactggaggaatgggcaggttaaatgaataggtaatgcaaacttctgaatactacaaggcagttagaagtcatgaatcagatgtacatacaggaacatgatggatctcttttgaaaaagtaataaatggaataaaatataacagtatcatttatgtgaattaaaaactcaagcacacacaaaagcacgtttttcaaaaatacagtcaatcctcacaaatcccatgtttgccaattcacctacttgctaaaattaatttgtaaccccaaaaacaaaacttgcggtgtcttaggccgggcacggtggctcacacctgtaatcccagcactttgggaggccgaggtgggtggatcatctgaggttaggagtttgagaccagcctggccaacgtggtgaaaccctgtctctactaaaaatatttaaaaatcagccgggcgtgctggtgggcacctgtaatcccagctacttgggaggctgaggcaggagaatcactcaaacccaggaggcagaggttgcagtgagtctagatcacgccattgcactccaacctgggtgacaagagcgaaactccatctggaaaaataaacaaaaaacttgcagtgtcttgcagtcatttgtggacatgcatagaatggcaaaaaatctgagtcacccacgtgcacattcccagctgaggttgaacaaggcgacgttcccttatttcagctctcatactgtaaacaagtgtccttttcacagtactttttcaaatttttgtgcttttgattggtgatttcatgttttaaatggcctccaagcagcagcactgaagtgctgtctattgtatctaggcacaagaacgctatgatatgccttacaaagaaaatatgagttagatacgctttatccaggcatgagttttagtgctgttggccgtgagttcaatgctaatgaatcaacaatagctatgaaaaaaaggtgtctttatacagaaacacacataaaacaaggttatggtggggtggggggaggggggagggatagcattaggagatatacctaatgctaaatgacgagttaaggggtgcagcacaccagcatggcacatgtatacatatgtaactaacctgcacattgtgcacatgtaccctaaaacttaaagtataataataataattaaaaaaaagaactaccaaaaaaaaaaaacaaggttatgtactggttatgtcagttatcaactgacaaaaatgctgtgaatagctcacaagaacctaaccctgcatttcccgtaagggcaatgcctcagtattcactaagtcagtattcatgatgagtttatagaaagtaactactaagaatgataagaatcaactgcacaaacaaaagcacatatattaaacatagtagaccagtcagccagtgaaagtagagaatggagagatagacaaaagggaaaaaataaattaattaaatgagaagagacttgcacacaccaattttaaggtgctatgaacaaaggagtatggtaattcatactgataattctaaatctgaggcccaaactaaataaaaaagtaaaaacagagtaacattctagtaagagaggtaattcagtaaatgaatagcctaccacacagatgtgcttgcagagttctaagtataaacaataaacataaaacataaactaagaagatgggggtaaggaatcagagaaatgtcttaagataaaaaagattaatatacctgaggtacactgtgttttccatacttccaaaacttattctgtgataaaagagacttaaatttctcctccagagaatcaagctcattatcaggtaaaaggcaaagtaatctctttaatgccaataaggaacaagttacaacccggtagaatttagcttctctttcttcctctggaacagttcttgatataaaacaaaataaatatatttaaaaatttagaattagccaaactatatatctggtggttctatttaaaatgttttatcattaaatatctaccaaagttgctttatttctatcttctatttcccctgtgccaacgcccctcaaaatgtaaacatacaaagaaatttaatcacatactttactactaatacaaggtgaaagtagacgaaaagccaaggcttgcaataagtgagaaagtataccgctctcggtagcatgtacaagggtgatcccagggaatggatatcaagccatctaagactattttccctcaaggactcttaaaactttgattagaatatagaagtaaacaaaatagtttactactctttcaacagaactatttatattcttcaactatgttcaaccagaccttaaaatacttcctcctacaactgtcaaaaagtaaagaaggaaacatataaaaacatctctttctaatacaaccaaatgtgtagctcccaggtaattcaagttaaatagcaggacaacttgcaagtaaaagcacttaatacagcatctcacatacagcattatgttattttcatctctacatatattattccttctttttaaaaatgtcacacagggccgggcccagtggctcatgcttgtaatgccaacacttcgggaggccgaggcgggtggatcacctgaggtcgtgagttcgagactagcttgaccaacatggtgaaaccccatctctataaaaaatacaaaaaaattagccaggtgtagtggtgcatgcctataatcccagctactcgagaggcttaggcatgagaatcatttgaacccagaagctggaggttgcagtgagctgagactgcgccactgcaatccagcctgggtgacagagtgagactctgtctcaaaaaaaaaacaaaaacaaaaagtcacattgaaatcatctgattacttatgagtgaaacaaatccttaacatgagttacaatgaaacaatacaacttactgcgggtcactgagtgtatcaggtgtttcttttataagatgatcctgcagcacctacaaaggggggaaataccaaagcctttggttttactgaactgtcaatggtgaacagacagagcctagttaaataaaatccactttttaaaaatccccataaacatcatcttacctaagagcagaatcaaatagcaaaactgaaaggtttgaattttaccaattttccttttcctatcaattcccaaggttagctgctttagatacttcttccccacgcacctataaatactcctgaccacttgttcctccatttctctttcacacagcaatgaagtgaatgtgaatctgggagataaattaggctctgctttcctctcccctctttctgtaagcctgcttgcccacaaagaacaccatacattgtgctctgctccatcacagaggaaggtatgaggttttcaaatatacggaagtctgtttcctcctggggtgcagtgcaagggagtccactgttccagtaactgctttatcagcaataacaataactaacacttattgagcttttgcatgtgccaggtattgctttgagcacattttaggcattaactaaatcaatcctcagaactccatgaagtacaagttaattcctgctttatagattatgaaatgaaggcacagaaacttgcccaaggtcacacacctagttgctagctgatggcagagtgggactagaaccaatggtgtgacccagagcccatgtcttatagacagtatgatatactatctataatgctgacattttgattttcatttgcctaactcctctctaatacatgggtttggaactggagacagttcaatgccaacagctgtaatgaactgtaacatagccaactaaagggaaaataaaatggaagaaataacccaatgttcaatgattagttatccatccatgacaaagccaagaacaaatttattttctaaagcctatgaagagccaaactagttgtctcaaaatccatttcctaaagctcttagcgtccaaactcatgacacttcactcttgtaacgtttataacttggcattttaaatcaaccaatgattcttatgctacagatgggttagaaaactccatttgagcatatgattaaagctacaaaccctctctctagaaaaacacgcttggtacacctgagaaatgaagaatggaagaacctaaatgaggtactacaatcaagttatgtgttggggagtgctgggtgaagagattagatagggaagcagggaccagatcatgcagagccttgtatgtcaagacaagaaatttgaacttaaaagtgtaatggagagccacaggaaggatggctaattgaaaggaggaaggaaagcagggggagagggtcagatggaaatgtttaagtagggttatacacagggtgttgtggaaacacaggagtactaaataagggaataaatgcaagcatagattttttaaaaaattatcaattccctcctcacttctacttcatctacttttatttctcaatataattctaacaactttgttgtctggtttttctagtccatatattgggaatagaaaatgaagggggaagaaatgagacactactagaaacagacacactgaaagccacaaacaggtatggctggtaactttttatgagaaagttatggcaaaagtgttagcccagtgtggagaaactttatctgaaaatgggagtataaatttgtttggccttttgaagggccatttatcattataaaaaattttaatgttcttattctttggcccaacatatgcttactagaagttctagtaagtatcactcccacaagggtatgaagagatctactcaagaatgtttactgaaatagcatttgttatgataaaaattggaaaaaaatccaaatgtatattaatctaaaaagttaaataaactacagtacatccatgtatagtaataccagagagccaataaaaagaaaaagacactaagttagatctgtatatatatatatattgatatggaaacacgagagaaaataattttagatttatttttagatatattacttgtttagattacataaaacatctactttttaaaaatataataaagacttcaaaattaaaatggaaaatttaaatactgtagaaagatccaatccaaaatgttaatcttgttaaagatccaaaatggttatttaactaaacagaattttaaaaaggcaaccttcagttggaaatactctacttactcattcccctacaatcccaagtaaaagagctgtcattatgcttataacccttaaatacttaaaaaaaaaaaatagattcagaatgattccagaacttacacttgtaatttcatccttacaaaatgctatggcttcaggttgcttgcttggaggaaaagccgcttcaaatgcatcttttgctgcaaacgcagctggtgtgtaagtatcacactgagccattagccaatatcccattaaactttttaagtagggagccaactgtttctttactttaaggataagtttttcaaaagcttgttgtgtggcttctcggacgcgacggtcatgatcctattaaaaatataaatgtgatttaaaatagctctagcccataaaaacaatcacagacatttccggatatgctataatgacccattaccaagaattcacctatgtattaagctaaactgaaatcattttttttaaatcaataatttggaggtttttaaatcagaaactatgtaaaataatttattaatttttctttctccccttctcccaatgagataggattgtattcaagacagattcaaagttgggccttgaggccgagcctggtggctcgtgcctataatctcagtactttcggtggccgaggcaggcggattattggcggtcaggagttcaagaccagcctggccaacatggtgaaaccccgtctctactaaaaatacaaaaaattagcggggcatggtggcacacacctgtaatcccagttactcaggaggctaaggcaggagaatcacttgaacccaggagacaaggttgcagtgaacagagatcgcgccactgcactccagcctgggtgacagaatgagactccgtctcaattaaaaaaaaaaaaaaaaaagttgggtcttcaataattaagcaactcactctcattcttctgcagcaaatatacagggaataaaatcactatcaaaatttattaaaactggaaagcacctgggtaattctccagtaacaacctaatttctgaaaacagacttcctaaatgttcttcataacccaacacaatccaatcttttttttttttttttttaaagacattgtcttgttctattgtccaggctggagtgcagtggtgcaatcttggctcactgcaacctccgccccaccgggttcaagcgattttcctgcctcagcctcccaagtagctgggattacaggcatccatcaccacacccggctaatttttgtatttttagtagagacagggtttcaccatgttggccaggctggtctcaaactcctgacctcaagtgatctgcccacctcagcctcccaaagtgctgggattacaggcatgagccaccataccaggccccaatctctttttttatttccacgctcttctcaagtgttaacaattcaatctgcataacaatgctgacataacatttaataaccctcaccaaaaatcaacattataaatttgagagtctccatgactccaaccaaaaaatatacaacagaaataaactagcaaagttttaatacttacaagtgaaattttgcaaaaaattcttggccaatatggaagaactcctttcacagtttctgtgtctctctctgtacacatggttccaaattcctgcatagcctaaaagtaagttattaacatcattaggattaacaaccataataactggctatagattattctgttctggaagctttgtctattttatgtaataggagaatacactatttctctttatgccatatgagactagtttgaagagctctttcacaggctactacggtagaaactcttcagttgtttttttaaaaataaaacatctacaaacaaaaaaacctcatttaaagttacaaggtcaaagttacattccctaatgggaaaaactatacagccaaaattccaaagcactttaaaaaagttcactgtaacaaactaatttacgacctagaaaataaatatcaactaagtttaagactctgtgtcagaaaaaagtacaattataaaagaacttagcaataaattgttcatttttctttacataaaacatgctaatgacattttattttaacaaagggattttcttgataatttttatgaaaacaagaaaacttgcttttaattttgtggtgacatctttctttgaaagtttccgcagcaccattcggaaatcagaatctacaagactgtcaatttcttcagctccttgaatagcaggaacatagcctaggtcactctgagatgttccaaaaccaataaatccaggcactgttccctgttctttggcaaggagttctgcagctcggccactgtttgaaggctgataagaaaattacggagaaaaaagtcagagtccaggaagggttcaaaacttaactttataattccttggctattcccatggtcagaatgagcttttattttattttcttttttcctagcctaaaatttcatctattgcaaagttccccaaagattaatggttttgttgccaagaatccatcaatactgatcctagaaattattctgtttcttaaacattagaatgttttgtaaaccatggatacaatccattagtggctcatgatatcaatataatggaccatgacagaattttaaagaaattgattaaaatttttaaaatcagaatgtatcacatgcaggaaaattttcataaatgctgttatgaattttttatttctaactttcatataaatagtatgtatacacatatgtatactatgtaatgatgtaaaatgaactcataaatagaacccatcctttcattcacccattaaatgaacaaatatttattaaacaatcacaatggcccaggtctaatgatagctgcctctagactgagagttccttgagagtggatacactcatttccacacactccaaagcctagcctaacctctttgggctaaaattacattattatagccataaaaatcaatacaacagtcaatctataatacagactcctttgttttgaatcatagtcagtggtttctttgactgatacacaatatagtagtcttctactaaaaggaggtgagttgatacagagaaagaaaatatttgaactgctaaaagaaattaacttattgttatctaaacagaaaatgcttcagtttgaccaccaagctgacatcacaacccatctaaagtcatctatttcttatttctctataaggatgtttgccaacggttatccaaatgtgtgattcaaattgctcataccggccgggcacagtggctcacgcctgtaatctcagcactttggaaggccaaggcgggcagatcacgaggtcaggagttcgagaccagcctggccaacatggtgaaaccccatctctaccaaagatacaaaaaattaactgggcgtggtggcgcacgcctgtaatcccagctactcgggaggctgaggcaagagaatcgcttgaaccggaaggcagaggttgcaatgagccaagattgtgccattgcactccagcctgggtgacagggcgagactctgtctcaaaaaaaaaaaaaaacaacaaaaaaaaacaaattgctcataccggccaggcaaggtggctcatgcctgtaatcccaacactttgggaggtcaaggcgggtggatcacttgagccctgaagttcgaaaccagcctcggcaacatggcaaaaccctgtctctaccaaaaacacaaaaattagccaggcgtggtggcatgtgcctgtaatcccacctactcaggagggtgagtcatgagaattgcttgaacctgggaggctgaggttgcagtgagtcaagattgtgctactgcactccacccagggcaacagagcgaggctctgtctcaaaaaaaaaaaaaaaattcctaatacctagcaaaagtgtgtttggaaaattcatctgacaaggaataatctggcctacttcctaaactgaactgagtgaacaggaaagaaaatgatggcctgcattacatttgttttcaatctgtagcatttaagactaattccaaaaaaggttctctatttttttttttaagtgaaagtaagtttattaagaaaataggtcaggcgcggtggttcacgtctgtaatcccagcacttcgggaggctgaggagggagatcacctgagatcaggagttcaagaccagcctggccaacatggtgaaacgccgtctctactaaaaatacaaaattagccaggcatggtggcacatgcctttaatcccagctacttgggaggctgaggcaggagaattgcttgaacccagggggcagagattgcagtgagtcgagattgcgccattgcactccagcctgggcaaaaagagcgaaactccatttcaaaaaaaaaaaagaaaagaataaaagaatggctactccataggcaaagcagctgttctctattttttaagtttattaaaatgaattaatattaattattcaattcacctttctcaatattggtacatgaataaagagccacaaaggaagtagttagtgaattataattcttaaactaaatatgatgactttagggtatcagaattttctacaatctcatgtgtaaacggttttattatgaaacagaataaaaaactaattattgctaacatctaaaggagttgaggctgaaataacagaattaggagtgataactaggggcaaaagagaaggtatcaaatttccagtctccaatttaaaagtaacaagttacttttaaatgcactatctttttttaatgtctactttaaatttaaaatatagttactcttatgatctttgtatgttaagtgctatacccatagttcaataaaaattaagaaacaattctatttatggcacttatttttttttttgtactatgcctacttctgtctacactctttcatgcctagcttctagagttatttgtggtggcaatcctgagtctacaaagaccaaaccaaggaagacttacaagacctttcaccatctaacctcaacttttcccagtcttatctcctgccactctttccttcccttgccccacttccttctcccttcttcaaattatgctgccatcattcatgccctagtagcaaactgaattcgaagttctctgaggcagggcatggtggctcacacctgtaatcccagcactttaggaggctgagcgtatctttgggcagatcacttcaggccaagagtttgagaccagcctagccaacatggcaaaaccctgtatctattaaaaatacaaaaaattagccgggtgtgatggtgcatgcctgtaatcccagctactcgagaggctgaggcaacaaaactgcttgaacctgggaggtggaggttgcagtgacccgagactctgtctcaaaaaaaaaaaaaaagttatctatgtgatggcctttcacaatttgatctttatataaccttttttctctacctgaaaacgcttcctttcttttcactgtctgacaaactcctactcatctttcaaactcatgtttgcaacacttgccttcctccattctcttccattctcccacattctttcttctaatacctgcatcataattctttaacatttgcttacatatgtgtctgtatcatcaaactaatagttcaagaacagcagacatctattatctctgaatacctgacatccagtatcagagtcttctattgaagactttgccacattaaagttaaaatcccaactccacaacttcctggctacatgagcttaggcaagctaatttctctaaacctcagtttcaccacatttaaaatgagatatgagtaattaattcattagttgggttgttttcatgattaagcataagtttttaaatcaccatagtaataactgattccagcaagaatcaaagggtgctcaaaccattaggtgaaagtttgtggaagagcaggacattcacagtttcaaactaacatattatttgttattggccaatggaaaaatataactttataatgaacaacaccttaaccaagtaattaaacaaataccaccaataaggggacaaacaggtgcgaagtgcccctggtgtgtgatgcactgagaaagactcatcatctatgaagaattccttctaaaaattgtttagcctgaatctaatcataaggaaaaaactagatgaatctgaattaatcaaacaaatggcccaggctcttccaaattttgttaaaaaagacactcctctccccgcttaaacagtactgagaaactgtctagatcaaagaaacccaaatggtaactaaatggaatgagtgatccttgactgaatctcagatgttaaaacggtttatctttttaaaaaagtcccagcctgggcaacatggcaaaactctgtccctacaaaaataagctagccgtgatggcctgtacctgtagtcctagctactggaaaggctaagctgggaggatcacttgaacccgagaggcggagattgcagtgagccaagttcacgcctctgcactccagcctgggtaacagagccagactctgtccccgaaaaaaaaaaaaaaaagattagccaggagtcctagctactaaggaggctgaggtgggaggactgaccgcttgagcccaagaggttgacactgcagtgggccatgatcataccaccacactccaggtttggagacagagcgaccctgtcttacaaaaaaaaaaaaaagaaaaaagagaacattattgggataactacagaagtctaaatacaaggctgtatcctggattacagtattatacaaaagtcaaagtttctgcatactataaccattattataattgctgcaggctagaaaatggcattgtttttagaagatacatgctgatgtatttaggagttaagagtcccgacttctgcaactaactcttataagttcagaaaaatacataaattaagagagagaaagcaaatgcaaccaagtattagcaattggtaaatgtaggtaaagagtatatgggatgtcgttctaatattcttgcaacttttcctcataagaacttttcaaatataaaacatttgagaaaatctgttaaataaaaaacattaaaagatgcaagtaaagtgcttagcacagtaacacaacaggttgctataattgttaatactgttattatcttccaaaacagattaagtgacagatctaagaaaatgtgacattgaaatcactagaattaactacatcagaaacaggaaaaaaaagcattctcataaaattggactgtgctataataaatctaacaccataaaaaaataccattacaaaacccctcatcgtgtagttttacacgaatccactttaaggtcgtccttaagcaagtacttagtgagcgtctattaggtgccagtctgttctaggttccgaggataaaaacatttgctttcaaaatacttacgtcctagtgaaccaagacaataaatgtcataaatacaatggagtaaaataaagtaggaagaacatgggagtggggaagggctaccaagagggtgatcatgggagacctcactgaggtgtcgagagcaaagtttggagccacctaactgaagagcgttgggagccggccaggtagtcaaggcacagtgaagagatcagtgtggctggatgaagtaagccaagaggagggagctgaagatgggactgcagatggaaaggggtaacaggcagtccagaaaccaaatataccatcctaagagctttagcttaggagaagccactgtaggtagcaaaggagaggcacaatctgcggtaacctccacagtggattcactttaacattctcccaactctccttcttcccagcgccgccctcccccaaccaacccgctacctcggccagatcaccttccagtgaacctgacacattatcatttcttcatgaatattatgggtgtgtgctcggatgaggacagctctggcatggtacatcttttctctcacgattccccaatctgctcagagataacacaaaccgctctcagggacgcacacacaacagagaggtcacactcgacagggaaacacacgcctccctacagccgcgctccacacaccctccagcaacgcgctgggcggagccagccgcctcgaagcgaggctcccgggtcggccgagccagcccccgctcaccctcaggttccctttagttcgctgcttgttcttcccgcccatggtcgcggttgcagctgtactctgagcactcagaccccggttgacacgtccgggacacaacttccggcttctggcggcggaagaggacaccctgtaataacttcccccgggcccttttccgccacccaccctgtccatttgctgccccacttccgctcccgcctcccgctgtgtccctgaccatccgccaccggagacgtcacagctaaagccacgcctgtctgagtgatgtcattcctggccaataggaagccaagcattggacccgtggcgccaaatcctgtcctccccgctttcagaagctaggtttgttccttgcttagagggtaggaaactggcgtgaatcatcagaggggcagtttcacataagggtagcattagaatgttatggtagaggctgtgggaagatgggagtgttttagacttccaacatgatgcaatcatcagtatcacctgggcgttttttagaaaaggccaactcgggcccctcagaactcctgaatcagatcctgcattttgacagtattcccaagtcttgttaaaatttgattactgctgtaggcactattctctctaaatctcccctccccgtccccttttattcatattgaaactgttaacgtgcagtttaggaaagaggataatgtgggagtccctattaaaatttgaaatgtacaaatcctgtaacccattgattgtgcgactcagaatcacaccagagaaacaagtaaatgtgtgctggttattgtttcttgtccacgcagtcacccttttatactcaactccatgttactgggggggcttctgctagattccaccaacaggacgaacaagagggaaacaaaggcaagaggaagaagggacttgctccattctgtaagcatcatgccagcagcagctgcattttaccgtggcaggagcaattgctttagccaaaaggtggttttaatctctatcctttttccaacaatcacagaatcagccttattgcacccctcagagatcacagcagcagtcagtgctctcctcagagatctgaattctactttcatgcggcccctcccctgagctcctgagatagccaatgtttgagccacctcctcagaagtttgagcctcaacaccgtgggatcccttctttgtgctccagagatccagtaacagccagccatcaccctctcttcattcttcataggcctgaactaaggtgttcagggccctccttcaagcttttaggttctgatgactccaaccacttcttttgttccatcctttcctagctctaggaatggtagctgctacctgcagtgattacctgttaccttttataattccttttgaccaatttcccatattaaaatatttctcaataactaatgtgatttctgttttcctgactggaccctgattttaaaatgcacacaaaagccaggtgcagtggcttatgcctgtaatcccaccactgtgggaggccgaggcaggtggatcacctgaagtcaggagttcgagaccagcctggccaacatggcaaaaacccatcgctactaaaaatacgaaaattagctgggcagtggtggcaggtgcctgcaatcccagctacttggaaggctgaggcacgagaatctcttgaacccgggaggcgaaggttgcagtaagccaagatcatgccactgcactccagcctgggtgacagagcagactgtctcagaaaaaagtcacacaaagagacatattacaggaggttcacaaaaactttataatagaaagataattgtaagcaacctatgtctatatattggagaactgctaaataaattatatgtattcaataagctattaggcaacatttaagaagaataaggtttatctgaacacacataggaagaattctaagacacattcttaaataaaaagcaaataccaatatatacagtatgataccatttgtgtttttaaaacccacaacacaataatatatatatatatatatttatgcatatatatataatataaatacagagaataggccgggtgcggtggctcacgcctgtaatcccaacacttggggaggccgaggtgggtggattgcttgaggtcaggagtttgagacaagcctgaccaacatggtgaaacgccgttgctactaaaatacaaaaattagctgggcatggtggcaggcagccgtaatcccagctactagggaggctgaggcaggagaattgcttgaacccaggaggtggaggttgcagtgagccaagatcgcgcctctgcacttcagcctgggtgacaaagtgagactccgtctcaaaaaaaaataataataaaataaagatctgcaagaatacataccagtctgatcattgtagtgactttttgtgggaaaaagtggcaagaaaagacattagggttaagagttatagtcaaaggaaattaagccttatctgtaagattttattttatacaaggacaacatcttcatgtattaattatgtaattaaaaatcaactcaggctgggtgcagtgaccgatgcctataatcccagcactttgggaagccaaggtgggtggatcacctgagatcaggaattcaagaccagcctggccacgatggtgaaacctcgtctctaccaaaaatacaaaaactagctaggcacggtggcacgcacctgtaaccccagctatgtgggaggctgaggcaggagaattgcttgaacccaggaggcagaggttgcagtgagccaagatcgcgccactgcaccccagcctgggcaacagaacaagactccgtctcaaaaaaaaaaaaaaaaaatcaactcaacaaatattgtttgtttaaaataaatcattggttacatatatcatggtacattggttatacaaattgtagtgtcctcattcttgagagttatacaatatagctgcaaacagtttaacacattggaaacactactagatatcatgccattcactgaaaatgtgggtgtcacatatcaaaaatgctacagaaggggaagattaacatgtgcttgagtagtcagataggctttccaagccaaagcccaaagcttggaaaacattaggaaaagtaaaataaaagggagaacattcaaaatggggacgagagagggacagagacagtgagttggattagcatggatttcggaaaggacagtcaagaatctagcctaacttcagtgcagacttacccagggggaaaaaaaaaaaaaaaacttgaaggacaagactggaatgattttctgtgctcctatttactaattgtttcctaaattttgtctgttcttgctggaaatatctcttcatttcatttccttgtattctgacgagactttccaccttttgcaacagggatccatgcctcttgccatgttcctcaactactccaggccacacagatctctcttcgattttcctaggacatcaacttataactggtttatttttttacccagaagtcagtaggatattactgctttgggaacttgaaaatagtctcattgatttaacagtttctcatgtttagattttccagcaagtctgtaaatcctttgaaggtgaggctatctccatggtactcttaaacagtgcctgccaaagtagatacccgcaaatttgttttaattgattcatacaaggttttagaaatcagaaaataattgtttctatcaatacagtaggtgataggcagaaaaggtttggacagaagaacattaaaaataatgtttaatttttgtcaaaatgttaatgtttatgtcaagaaatgtcggctgggtgcagtggctcacgcctgtaatcccaatgctttgggaggccaagccaggaggattacctcaagtcaggagctcgagaccagcctggccaacatggtgaaaacttgtctctaccaaaaatacaaaaattagccaggcgtggtggtgcgtgcctgtaatcctacatactcaggagtctgagacaggagaatcacttgaacccacgatgcagaggttgcactgagctgaggtcacaccactgcactccagcctgggcaacagagcaagactctgtctcaaaagaaaaaaagaaaaaagaaatgtcaatacttttaaggccaagattagaaactcttcagaaaccaggttgggagttaaaaaaaaaaaaaaaaagagacttgaaaccctcccttcttcattcataattattaatattataaattcttgttttcacagattaagagttacacatcagaattatagccttttttccctaagtaaatattgggcatgccttacagaagtctgatgttaaaataatcttacccatccagacaagtttctgaggaggaaaatcagacatcaagcacttaaaaatatatttcggctgggccaggtggctcacacctgtaatcccagcactttgggaggccgaggcgggtgaatcatgaggtcaggagatctagaccatcctggctaacatggtgaaaccccatctctactaaaaatacaaaaaattagctggacatggtagtgggcgcctgtagtcccagctacttgggagactgaggcaggagaatggcatgaacccaggaggcagaccttgcagtgagccgagatcgtgccactgcactctagcctgggcaacagagcgagactccgtctcaaaacaaaacaaaacaactcagcattaattaatctttattaaacttggtggtactttaccttcaactgttattaagatgtatttttttgggggggggtacaaatactttttaatgggtttaaagtttttctttttctttttaatctactggaaaatcatgcaatgctgcgagcattggacacaatccagggccacaagtctgcatactcctttgctactggtcctataatggcagaacctttcattttgcctttattattcactatgacccctgcattatcttcggaataaagaaacacaccatcttttctccggtatgactttggttgtctaatgaccgctgctggatgtaccatttttctgagctctggtttgcccttcttgactgtggccatcaccatgtcacccacactagcagcagaaagtctgttccgctgtcccttgatccccttcacggagatgatatacaggtttttggctcctgtgttgtcagcagttgatcacagctcctactggaagacccaaggaaatccagaatttcacaccagaggacctaccacgtcctcgctttgacatcttgaacgctggaaagaaggaaaaaagtatttttaaattctttttaagcaaacttcttatttaaatagcagcaacactacataggtaatatatgccagcagagcatttgtttgtcaactgagatctgtagagagtcaattgagaaaataagatataatagtttgctaacactacaaaataaatgtacaataagaataatttcagtatataccagctgtaactcatcacaattcaacatgagattggggtggggacaaatgtccaaactatatcagagggatttaaaagaaaagaaaataaccataatagtactagaggaatatataggtgaatttccagttcaaaatagcatctgctagcagcccctctcaaattcacatacacacaaaaaaattgatgaaaacattgaagacgacaaaaacaacacaactaaaattaaaactgatgaaaaacagacttccggaatctagaaggaaactgtaatactgagtctggactcaggaagtcaagaaggcaggaaggagatacagacacatgtatatattatttccttaccacataaaactgtgtcctttccacggtggctcatgcctgtaatcccagcactttgggaggccgaggcgggtggatcacgaggtcaggagatcaagaccatcctggctaacacggtgaaaccccgtctctactaaaaatacaaaaaattagccgggcgtggtggtggacgcctgtagtcccagctactccggaggctgaggcagaagaatggtgtgaacccgggaggtggagcttgcagtgagccgagatcgcaccactgcactccagcctgggcgacagagcgagactccctctcaaaaaaacaaacaaacaaaaaaaaactgtgtcctttcttgctggtctaacccctactcctatgtgccctacaaagccctttcttcccacatattctttggaattgcagcttcggtgatgagccaatattcaccctcaacacgtgtttacagtttggctaatgacagtgcttccatagcagcctctcatgagtgctgtttattgtctaaaatcctacctacctcaggggtctgcagataagaataggatcttctttgcttccactttccttaaaacaataaatcattgtttttgggctgctgtcaacagaatacaccttctgacatctgtcctcttaccagcctcctggtcactcccttttagtctctaaagacttagcacttggctctccaccctcattccaaacatcatcctggatggtctttttaaagtcctaattaggttcatgtggcatatctgtccattgcttggcctctcagttataaaaatcttcatctctcatatccttttcctccattccacttcatctaccacaccacagtcacatcctgatattaatacttaaattttcccaatttcaccccactcttgggtcacaatctctcttgccagattcctcatttaactgtttccacctagacattcttcaaggaaatcttaaccttgcattggcccttatattttctcgctaactttaaggactcttttctctttactctcttcattgttcactttagagttcatgatcttttgtgtcaatcactctcttgccaataccacgaagtctcttgtacatctgctctttcagcctattcatctggagaaaccaaacactacacaaagccaattatttgttttcagcttttttttttccagagaaaagttgaacactacctggaaaacaaacaatttagtcaacacaagctttagaccactaagaattaattatcccataccttagttgtgtcttcaatacagcccaacaaatgtaccatacttccgtaatgtcttaggactcccagcaattaattatttgaacacttcttcaaaactctgatcattctaccttcctccttgacttcaacagatgagttttcctccaatttcacagtgagaggtgacagcgtgctggcagtcctcacagccctggctcgctctcggcgcctcctctgcctggggtcccactttggcagcacttgtggagcccttcagcccgccgctgcactgtgggagcccctttctgggctggccaaggccggagcccgctccctcagcttgcggggaggtgtggagggagaggcgcaggcgggaacccgggctgcgcgcggtgcttgcggaccagcgtgagttccgggtgggcgtgggctcggcggaccctgcgctctgagcggcctgcctgcccgccccgccggcccggggcagtgaggggcttagcacctgggccagcagctgctgtgctcaatttctcgccgggccttagctgccttcccgcggggcaaggcgcgggacctgcagcccgccatgcctgagcctcccctccccgcttccgtggctcctgtgcagcctgagcctccccgacaagcgccaccccctactccacggctcccagtcccatcgaccacccaagggctgaggagtgcgggcacacggcgggggactggcaagcagctccacctgcaacccgggtacgggatccactggatgaagcccgctgggctcctgagtctggtggggacgcggagaacctttatgtctagctcagggattgtaaatacaccaatcggcactctgtatctagctcaaggtttgtaaacacaccaatcagcaccctgtgtctagctcagggtttgcgaatgcaccaatcgacactctgtatctagctactctggtggggacttggagaacctttgtgtggatgtacctagctaatctagtggggaggtggagaaactttgtgtctagctcagggattgtaaatgcaccaatcagcaccctgtcaaaacagaccactcagctctctgtaaaatggaccaatcagcaggatgtgggtggggccagataagagaataaaagcaggctgcccgagcaagcagtgacaacctgctctggttcctttacatactgtagaagctttgtttttttttctgtttgcaataaatcttgctactgctcactctttgggtccacactgcttttatgagctgtaacactcaccacgaaagtctgcagcttcactcctgaagccagcaagaccaggagcccaccaggaggaacgaacaactccagacacactgccttaagagctgtaacactcactgcgaaggtctgcagcttcactcttgagccagcgagaccacgagcccaccaggaggaagaaactctcaacacatccaaacatcagaaggaacaaactccagacgtgccatcttaagagctgtaacactcaccatgagggtccgaggcttcattcttgaagtcagtgagaccaagaacccaccaattctggacacaagaggacaagataatcagattataatccttatcttttcaatagcaaacatacaaattgggctgatgattattatacacgtttaactaaatgggtgttagaatagtaaaattctctgataccctctgaaatgttctttcattgcccttcccatttccctaggatgtttctgacctccccctgattcctggctaaagtgtgaattgctgatttatcaggcttctaaaaccccattccagccctagacatatggctattccaatggatggtgatcaggtcatattggttgttaactatgttgaatatcccttcccacgaaacttccatcttcaattatagtcgctccataattctgttaaagaaataagtgttaaagatgggggggagaaaaatgaatgcacaaggctagtcattgctgcaccttttctttttttagaaggagtctcgctgtgtcacccaggttagagtgcagtggcgtgatcttggctcactgcaacctctgccttccgggttcaagcgattctcctgcctcagcctcccgaggagctgggattacaggcgcctgccaccacacctggctaattttttgtatttttggtacagacagggtttcaccatgttggccaggctggtctcgaactcctgacctcaggtgatccacccaccttggcctcccaaagtggtgagattacaggcgtgagccgccgcacccggcctaatttgttttttttttttttaaagaaaaccccgcatatacacacatgcaaaaataagatactagaaaataaaatgtaaaaccaaaatttaatattgtctttttggacacaggattgtgggtgactttaaaatccagttatttctactcttcctataatgatacatattatgtgtaatcatatatataatacatatatgtaatacgttatatataacatataaataatatatataatttgttggtgggaggaacaagggaaagcaggtttacaaaatctgaaaagccaaatgccccagtggggaaaaaaccctccatttcggtaattccctggttaaaatcgaggaacaccctggacttcgaaggcaccacctgggtcccagggtgcaccattcctctaatcccccagttgcagcaacatctgggaagtcccgagaatggggatctatgcctgtttttccaaaagataataagcgtcaacaacaacaaaaaaataaaaagtccaactccgccccaaagcagcatctggctggcctgcgagatgcccactggggaggcgagtccgcagcttaggactcaagcccggggtcggaagctattgccgaaatccgaaacgcagcgctcgcagctgcagtgacgcgacctgctcataagtccccgtgctcacagcatcccggcaacttacgagctagtgcttccgggtcaccccggcccaggaaggcgcacgcgcgaagcatagcgagcttcactccgcactcttaggctgcgtgtgaggcctgcgagtgctcgggagctgccgcggtcacaagagaaagcctagctgtcaatgacagccccagagcatctgggcgccttgcgatacccgggtgtctgtaggcagccaggagacacttccaagctgatctggaatctttcctcgcccagctctgtccctcgcagggatggcaaaggacattacgacctacatcccttcccggatctgatggcttcagattggcagattgtgttaaagtggaaggctcgtggtgcccctttgctgagtttttatggacttagttttcccaagtagttctaattatcgctgggggggtggggtggggcgggaacgtaatttctgcgtctgcccttaaatacctttaaaccttggctgcattgccgcttttatggaatttcacccatagtctgtcttttttagtttccctgatacgcatctttcttaataataataataataaataaataaatagcactttgggaggccgaggcgggcggattacctgaggtcgggagttcaagagcagccaggctaacatggtgaaacctacctctctactaaaaatacaaaaattagcggggtgcagtggcgcgcgcctgcaatcccagctactccggaggctgaggaagaattgcttgaacctgggaggcagaggttgtggtgagcctagatcacgccaccgcactcgcactccagcctgggctacagagcgagacttcgtcttaaaaaaaaaaaaaaaaaaaaaaaaaaaaaaaaaaaacaaggcatgtggccagtattccctgcctatacttgttttctttagaaaaatgtaacttttaaacataatttgacttgaaacggtttctttccaggatttatcattttttataggtgattccagttcaaactatttattacattaatatgttgacaaattgtcgttgctgaacaaattttttatgtgcaatcatacggaacattttatatttaaggatgtttatatatcaagtatataatcattggcagaaactgggcagggcgcggtggctcacgcctgtaattccagcactttgagaggctgaggcaggtggatcatctgaggtcaagacttcaagaccagcctggccaacatagtgaatccctgtctctactaaaaatacaaaaaatagcgagcgtggtagcacgcacctgtaatctcagctactcgggagaatgaggtgggagaatcgcttgaaccccaggcggcggaggttgcagtaagccaagattgcgccactgcactccagcctgggtgacagatccagattctgtctccagaaaaaaaaaaagagaaagaaacctaagaaagctatattgtttatactctaacatttctaacatttaactacatttatccattctcaaaggaagttggtcatcacaagattggaaaatctgtacttccctggcttatatgacttaatcataaatgtctaaatttgacagatgtcccaggaaagaaaacttataaaactactctgttgcattctatgtgtttatgtgacatttgagatctgcatattatacatagcaatctggtttttaatataatgtagagagactgaaaaagttttagcagtttagctgccactttagctgcttaaagtaatatatgcatcatctgccccctttggtggtagggatgtcagattccattctctgtagggtatttcatacaaatctgttagtcgctggaggaatcagaaactagacacacaactggtccacctggctgtctggtggcagcagaggaactgggatttccagggcaactgacggggcgataggacagggcagcagggaggaaatctggggacgtacataagatttaggtccaatacaagcactgtgctttaaataccattctgattctcatttatgtttaaccacctttatatttaagatctatccacattgccttcttccattttattccttcagatttctacattgtattacataatatatgctgtcttttactaactgattcattttgtgataagcatagtttgcctacaaccttttactaacttaatgcattgtctctcaccccaactccattccttaaccaagtctgactggtcaagaaatatccaacacctggtatcaacctgcatcaacctgcatgctagcaaattagcaaataataaatgcttttggaactaactggtttatggaggtcctcaaaaactgggtggtgtgtttatttaatgctaggtcaatttggcaaaaataaatgtacagaaagccatttccagaacaaaaaatgtcagaatacaatttgccaaacaaattttctaaattactaatttgatgaattgttgaggcttgttaaaaaagtttaagccctactaatgcctcagccttgtctgaggcaagcccaggagcaggggcagagcgtgagtatacaaaaagtggggaactgcaaactccacttcagaaaaacttcacctatttgtgtatcaaaaggctggggtaaatgcaaaactaaagctctgaaaaactctatttgacaaactagctttcaactgctagtaaaaagcctagatattggccaggcacggtggcttatgcctgtaatccaagcacattgggaagccgaggtgggaggatcacctgaggtcaggagttcaagaccagcctggccaaaatggtgacaccctgtctctactaaaaaacacaaaaattagccaggcatggtggcgggcgcctgtaatctcagctacttgggaggctgaggcaggagaatcgcttgaacttgggaggcggaggttgcagtgagcggaggttgcaccattgcactctagcccgggcgacagagcaagactccgtctatttaaaaaaaaagcctagaaattaaacaaaactggttttatttcataagatgtttagagacaggcaatggctggtgttgggtcagcagctcaacaatgtggcaactggcatcttcgtggttctcttggcccttcgtcgtggttcaaataactcctccagctccagtcatcactttggtgtttatggcagtaagggggggaggaggtggcctagctgcatatgtatctttaatcaggaagtaaaagttttcccagaattcccaaggccaaagctgtgtcctgaggccactgagagttgttagttgcaacagaggctgaaaggggagcaattagcttttctgggttctttagtgaaggcaggtaagggagaagggggttgggaatggctggcaaattggagcaccaacattacctttatggataatttctttttcaaaatgggcagctgatatgtgaagaaatatctaacaacaattttaaggttgtaatttgaaactcagttctgctttcaatcatgacatttttaacagatgcatttcagctatactattttttcttgtgccccactccccaacattctagaatggaactaaaataaaattacttaatctttcaagaaaaagtgggaaaaaaaaatcaaaaggccaacagtggcaagatactttcaactactcttgatgtcattgtccttctacaccaaagaacatctggaaaacatccccacatcctttggtgtttaagaactgatagagctgaccaaagtccatgtggtttcccctggctccattaacactgaacactttttcttcaaaaatggaaaatttcctttgtctttccgtttcatcatttgtaccatcaaaaggaatgtcttctcgatggcgaattaaaattctcttccagtttaattttctgagtctgaaaagaaatttccaaagtaaacattttcaaaatgtatattctagagcatttaaaacagaagttataaaacagatttatcaatgccttttcctagaagtagtctactttttaaaatgtttataacttttacttattgatttagtagaggcaggtcttgctatgttgctcatgctggtttcaaactcctggctgcaagtgatactctggcctcagcctcccaaagtgctgggattacaggtgtgagtcatacacaccccgtccaagaagtctacttttatctcacagggatttattttaatcaaatatgattctggtcataatctcatctctgaactcatttgttgcccttactacagccatgtatcagtagtttagaaatgtaggaattactgaatcccaaactactatggaccttctcagaaattcatttagtatatcagtagagaaatgagactagtggcaattctaatgcttctagaaagctccttacttcacagggtatacagtttgcagcatcactaaaatgagggaaggaccagatccatggaagtggatggggtcatagtgtctggggcaggagctcaattcattcagtgcatatttacagaatgtctcctacatgcacttgtcaggtgacggggaaaatgctgactacatgtgatttctgccatatccatcaacttgagattgaatccccataaagacacaacccctgggacatacttatctccacatctctaatagtcatgtgttgcttaacaacggggatacattctgagaaatgtatctttaggctattttgttgttgtaccaccacgacagagtgtacttacacaaacctagatggtactttttttgcatttatattttttcatatagaaaaccaaatgtcccagcaccattactgaatatcattctgatattcaatagtgggaagatcaagtgccatatatcaggtttctatatgtgctccattataatcttatggcatcactgttttatgtgttgtccactgttgaccaaaacgtcactaggcagcacatgactgtatcttgtttagtattaacattattgacatgacttcatatacatatgtaaaagcaaaccttgaccagaattcttcacaggcactttgtgggccttccacacaaacaacaccaggttttccaggcatgctaaacccagacagggaaagctcctttgcccactctagaatattctttcttttgcatttgttatagatatgatggctgtagatccagagtctcgtgaagatgaggtcaactgactggactgtgcttcctgtggtgggtgaagatgaagtatctctgctgacatagccagaggcgtgttctctaacccactctgtggcattcagtatacaaacatctccatgacaatgtttttgcaggaatgcagtcagatctgtgttcagctgagtctgctgggatctactcaataatactgatctaatagaaaagatacaagaaaaatattgtcttggaacagaaaacaaattcgagaattgcttttattctcagattaattttgacctccaaagttggccagagcttctgtaacgtacctgacagtaatttcaggcagaactgccgggtatttaaagggaagaatacaggccagagaaaacatcgcctgattaaagagaagaagaaaaagtgcactaaccaatgttttaagtctcaacatgtttcaatccctctaaaagcaaaactgaattaccattttttcgtcagatacatccaggttcatattgatagtaaagtagacttttgaagatcgcccctccattgtcttcttttcaatacaatctttcagttctgctacagccagctggtcattcactatgagctcattctcaccagggaacatactggctagcaggtctaactcagcaagctgggcctccgcctgctccatctcaatcatttttggacatgtgtaagtttctaaggaggtaaagataagagagacaatttacatatgcaatcttggaagaaatgaatacatcaacatgtgtacttactaaaattgtacttggtttcttcataaattgtacaatttaattagtctctttccctattactctactttcagatataatatgctaagtcctatgctaagaccagcctgagcaacatactgagaccatctataaaaaaacaaacacaaaaaaactcttaatagtaagtagacaccacattcttctgtgtctagatagttgagtggacaacttgagctaccataatgggcaatttcatcaaagtaaaccaattatgtagtcaaaaagctgtatcaataatgtagccagaagagaggatatgactggttacactggaaacctagaatgaacaaagtcagtcagagagtttggttacgtggatggtcaatttcttctttttaagtaaatattaatgtttattaggtttttttgagacagggtctagctctgtcaccacagctggagtgcagtggcatgatccccgctcactgcaacctcaacctcccacgcccaagcaatcctcccacctcagacttctgagtagctaggaccacaggtatgcactgccacgcccggcttcattttttatttgtagaaacaaggtcttgctatgttgtccagactggtcttgacctcctgggctcaagcaatcctcctgccttggcctcccaaagtgctagcattacaggtatgagccactgtgcatggcatttattagtttttttttttttttttttgaaacggagtctcgctctgtcacccaggctgtagtgcagtggcgcaatcttggttcactgcaagctccacctcggcgcgttcacgccattctcctgcctcagcctcccaaatagctgggactacaggcgcccaacaccacacccggttaattttttgtatttttagtagagatggggtttcaccgtgttagccaggatggtcttgatctcctgacctcatgatccgcccgcctcggcctcccaaagtgctgggattacaggtgtgagccactgcgcccggcctatttattagtttttaagaagcagaggaacataaagagaaaataagtgttaattgtcctgtagcttaagtcacccctgttaacattaaaacatcttaagcattatacatatatatatgtgaaaaatgctggtataatgtataaatatgtacaatgtgagatatatacagtatacatatttaaatccaaaggggataatatatactttttcctcctatttcctatctccctccccaccaaatatattttgtagatctattcactgtcaacatatagtgatctacctcattctttgtaactgtcggctgttatactgaatcatgtagatatgccataacttatttaattctttacctattgatggacacttgggttgtttccacatttttactaatatgaacaatcctataatgcaaggtctttttatatatatagtatggtaaactgaatactgtgtattcaataataaacttacagaggtggattgttgtatcaacatgtacattttaaattttgatagatattgccaagttactttccagaaagttgccatacagaacagaaatttacaattgtactcagtcccctgcttcttttctttaaaagaaaattcttaatacatagttccttttggcctagcacggtggctcacacctgtaatcccaccacttggggaggccaaggagggtggatagcttgagtccaggagttttagatcagcctgggtaacataacgaaaccctgtctctactaaaaaatacaacaaaattacccgggtgtgttggtgcgtgcctgaagtcccagctacttgggaggctgagacagaatcactggaacctgggagtcagaggttgcagtgagttgagatcgtgccattgcactccagcctgggcaaaaagagtgaaactccgtctcaaaaaataaaaataaaaaaaaaaaaccaaaaaaaaccctctccctctccctctcccgtctccccatggtctccctctccctctctttccacggtctccctctgattccgagccgaagctggacggtactgctgccatctcggctcactgcaacctccctgcctgattctcctgcctcagcctgccgagtgcctgcgattgcaggcgcgcgccgccacccctgactggttttcgtatttttttggtggagacggggtttcgctgtgttggccgggctggtctccagctcctaaccgcgagtgatccgccagcctcggcctcccgagatgcggggattgcagacggagtctggttcactcagtgctcaatggtgcccaggctggagtgcagtggcgtgatctcggctcgctacaacctccacctcccagcagcctgccttggcctcccaaagtgccgagattgcagcctctgcccggccgccaccccgtctgggaagtgaggagcgtctctgcccggccacccatcgtctgggatgtgaggagcccctctgcctggctgcctagtctggaaagtgaggagcgtctctgcccagccgccctgccatctaggaagtgaggagcgcctcttcccagccgccatcccatgtgggaagtgaggagcgtctctgcccggccgcccatcgtctgagatgtggggagcacctctgccctgccgccccgtccgggatgcgaggagcgtctctgcccggccacccggtctgagaagtgaggagaccctctgcctggcaaccaccccgtctgagaagtgaggagcccctccgcccggcagccgctgggtctgagaagtgaggagcccctccgcccagcagccaccccgtctgggaagtgaggagcgtctctacccggcagccacctcgtccggaagggaggtgggggggggtcagccccccgcccggccagccgccccttccgggagggaggtggggggggtcagccccccacccggccagccgccccgtccgggagggaggtgggggggtcagccccccgcccggccagccgccccgtccgggaggtgaggggcgcctctgcccggccgcccctactgggaagtgaggagcccctctgcccggccagccgccccgtccgggagggaggtgggggggtcagccccccgcccggccagccgccccgtctgggaggtgaggggcgcctctgcccggccgcccctactgggaagtgaggagcccctctgcccggccagccgccccgtccgggagggaggttggggggtcagccccccgcctggccagccgccccatccgggagggaggtgggggggtcagcccccgacccggccagccgcgccgtccgggagggaggtgggggggtcagccccccgcccggccagccgccctgtccgggaggtgaggggcgcctctgcccggccgcccctactgggaagtgaggagcccctctgcccggccagccgccccgtccgggagggaggttggggggtcagccccccgcccggccagccgccccgtccgggagggaggtgggggtggtcagcccccccccgggaggtgaggggcgcctctgcccggccgcccctactgggaagtgaggagcccctctgcccggccaccacccggtctgggtggtgtacccaacagctcactgagaacgggccatgatgacaatggcggttttgtggaatagaaaggggggaaaggtggggaaaagattgagaaatcggatggttgctgtgtctgtgtagaaagaggtagacatgggagacttttcattttgttctgtactaagaaaaattcttctgccttgggatcctgtagatctgtgaccttacccccaaccctgtgctctctgaaacatgtgctgtatccactcagggttgaatggattaagggcggtgcaagatgtgctttgttaaacagatgcttgaaggcagcatgctccttaagagtcatcaccactccctaatctcaagtacccagggacacaaacactgcggaaggccgcagggtcctctgcctaggaaaaccagagacctttgttcacttgtttatctgctgaccttccctccactattgtcctgtgaccatgcccaatccccctctgcgagaaacacccaagaatgatcaattaaaaaaaaaaaagtcttctattttctatttggaatacattttcaatttctgcatttaaatatttgatccatctgggatatacttcactttaaaaggtgacggaagtttccagcttattttttttttccagttaactagccatttttaccagtacatcttataataaatttgaaatgtttctttcaacatatgttaagtgcctatatgtatttgagtctttttctggattctccattttgttatattgatctgtctataatatcatgtcctaatactctttttttttttttttttgagacagagtctcactctgtcacccaggctggagtgcagtggtgcgattatagctcgttgcagcctcgaactcctaggctcaagcaatcctcctgtctcagcctcccaagtatctgggactacagtcatgctaccaccatacccagctaactaatactcaactcttgaaatcactatgatgggttagtaaattgctcctactctgtctcttcatagccatcactcttcttttctagaattcttttttggtatttcctggcttttctcacatataaacattagaataattttgttaagttttgaaaacaagaaaaaatggtaattgcattgaaattaaagattaggcctggcgcggtagctcacgcctgtaatcccaacactttgggaggcagaggcgggcggatcatgaggtcaggagatccagaccatcctggctaacacagtgaaaccccacctctactaaaaacacaaaaaattagccgggcgtggtggccggcgcctgtagtcccagctactcgggaggctgaggcaggagaatggcgtgaactcgggaggcggagcttgcagtgagccgagatcgcgccactgcactccagcctgggcgacagagtgagactccgtctcaaaaaaaaaaaaaaaaaagaaattaaagattaatacagaaaaagacgatatgtttataacgtagaattttcccttcagtagtttttttaatagctttaatgaggtataatttatatgccataccatactactgccaagcaagatctttaaaatgttagcatcccttaaggtttggttgaggacatctttatcttctctattgtctcatggtaccaagtattactgaatattaaatgttcacaattctcaaattcttaggatgttccaaattctcgagccccatatttgtaaatttaactatatctgtatatttctattggatgttatattagttcattttctgttacgataacagactacctgagactgggtagtttacgatgaagagaaatttatttggcttattgttctggaagcagggaaatccaagagaatggtgcctgcattttgcaagggcattcttactgagtcatcccatggcggaaggcagagggcaagagagaatgagagcaagtgcaagagagatgaaggggccaaatgcatgcttttatcaggaacccactcccacaataactaacccactcctgcagtaacaccattaatccatttgtgagggccctgttctttgggaactttttcaaccctgccttctttctcttcttctgaaatgctgatgacaggaatgttacattttttgttatatccctgcatatcacttaatcacctctgaaaggtcccaccactcaactctattgctttgggataaagcttctaacacatgaactttggggcacacattaaaccacagcagagaccatctcagtcttaacagtcctaaaataggtctaaatggcctggcgcagtggctcacgcctgtaatcccagcactttgggaggccaaggcaggcagatcatgaggtcaggagatcaagaccatcctggctaacatggtgaaaccccatctctactaaaaatacaaaaaattagccgggcgtggtggcgggcacctgtagtcccagctactcaggaggctgaggcaggagaatggcgtgaacccaggaggcagagctttcagtgagccgagatacagccactgcactccagcctgggcggcagagcgagactccttctaaaaataaaaaaataaaaataaataaagtaaaataaaataggtctaaattatatttctttaataataattcttttattatttcttttctgtttagagaacctattttaaccattcttttaggataggtctgctggtgacaaatctcctagatttccttcatcttagaatgtcttgatttccccttcatttctgcagaatattttcactggatgcagtattctggcttaacaggtttttactttcaacaattgaaaaatgctgtgcctcttcacctagcctctctggtgactgatgagaaatcactctcatttgaattgttttcctttacagataaggttcatttttgtcactaattttaagaatttttcattgtctttggttttcagaagtttgattatgatgcgtttttttttttttttttttttttgagatgggagtctcactttgtcacccaggctggagtacaatggtgcaatcttggcttattgcaacctccacctcccaggttcaagcaattctcctgcctcagcctcctgcgtagctgggattacaggcgcacaccactacgcccagctaatttttgtatttttagtagagatggggtttcaccatgttgggcaggctggtctcgaaatcctgaccttgtgatccacccgcgttggcctcccaaagtgctgtgattacaggtgtgagccgccacacctagtcttttttttttttttttttgagatggagttttgctcttgttgcccaggctggagtgcaatggcacaatcttggctcaccacaacctccgcctcctgggttcaagtgattctcttgcctcagcctcccgaatagctgggattacaggtgttcgccaccacgcccagctaattttttgtatttttagtagagaaagggttttatcatgttggccaggctggtctcaaactcctgacctcaggtgatctacctaccctggccttccaaagtgctgggattacaggcgtgagccaccatgcccagccccatatggtttaggtatttatcctagacaaaagcaatcctaattaggcgagagactatatgggcacaattcttatttgtgacttctcagagtcttaaactgtgaatttccaagaggggtgttcagtattctgtctgactccagaacatgtttttccaggccaaatgacattagccctcctctccacagaacagagcaggattccttattttgccatgtagttacctgaatttaagtagtttaaatataagcatttaaagtatcataaaagatggtgggtagccttgataatatttatacatatattaacatatatttattaatatgtctattcatgtttaatttgaagttttcctcttctaataactgttggaactgcaaatattcctccctcctttaatcgcaatgttttcttttgttttttttccgattttttatttatttatttttttgagacggagtttcgctcttgttgcccaggctggagtgaaatggtgcaatctcggctcactgcaatctccacctcccaggttcaagcgattctcctgcctcagcctcccaagtagctaggattacaggcatgcgccaccacacccagctaattttttgtatttagtagagatggagttacaccatgtcagttgggctagtctcaaactcccgacctcaggtgattcacccgccttggcctcccagagtgctgggattacaggcatgagccactgctcccggcctttttttttttaaacaaaatcctcatacatacttaaaatccctggacttattggaattccatatacatatttgctggtctgttttggagttgagaaacataaaaaacaactacttgggtggttattagaggaaatggtttactttgtttttttgttggcgtggctctgttaccagtgtttttggattctattaccagattgccaaggtgcgactcctggctctgccacttaccaactgcaggaccttaggcaagtggcttaatttatctgtgctttagtctccccaactccataactgggatgagagggttgctgtgatgattagatgagaatttgtggaaagtgcctggcaacagtaaattttatatgcgtgcttgctactattattattaattaaaaaaacctttttttttgagacagggtctagctctgtcacccaggccagagtgcagagtcggctcactacaacctctgctttctgggttttttagtagagacggggtttcaccacgttggccaggctggtctcgaactcctgccgtcatgatccacccgccctgggctcccaaagtgctgggattacaggcatgagccaccgtgtccggctgcttattactattattattattggtcatcatttcaacaaatgtttctcaagcacttacgttcaagcactggcactaagataacaatgaatgaaagtaataaaacaactctactggtgggaggataccatgacatcaaaaacaaatttatacgcccagcccaggtgcggtggtggctcacgcctgtaatcccagcactttgggaggatgaggtgggcggatcacctaaggtcaggagtttgagaccagcctggccaacatgatgaaaccccatctctactaaaaatacaaaaattagccaggtgtggtcgcccacgcctgtagtcccagctactagggaggctgaggcaggagaatcgcttgaactggggaggcggaggttgcagtgagctaagatcatacctctgcactccagccagagcaacagagcaagactgtctcaaaaaaaaacaaaaaagaatttttgtacccagtgaataactgctatgaagaaacctgaaaaagaaaacaaggataagggaaacaatgaggcagcaggggtgagactgcacacagcattgtcaggaaaggcctttctcctaaggtgactgtagggaagagactttaaggaactgaaaaaggaggccatgtgtttttcttggccaagagtgttcaagggaaagcgaacagcatattcaaaggccttgaggaaggagggtgctagaacagctggccagagcacagtgagctgaggacacggggaatagaagagtttagtaaggaaatgtggggcagtttatgttgggactagtaaagcatggccagaattttgaattttatcccgactgacatgtaagagctacaagagaggtttgacttatgaagatccccacacttgctgctatggagaaaagtgaaaggaaaagtggggtgaccagatatagacaccgcaataactagggagagatgatggtggctttgataggattatagtggtcaagttggtgagcttcaggttctggatacatgcagagaacagaggcaacaggatttacagatgaattacatgagacacggaagaatgactccggggctttaaggtactgaaagtatggatctgccatttatttagacgttgatggtcatggggagctgaagcttggttttagacacaagtaatgaagtgcctactaagacacctgttaaatagagaggtctagcaggcagttagatgtatagttttgaagtctacgagagactcagctagatatataatcttgggagtcaacacttatttggaactatatatttgtttaaagtctcccagggagtgagtaaagttgggagagggtgctattgaattggaggtatcgaagatgaaatgggattagcaaagaagaacgggacggagggactcttgaacggacaactacgggagtgatgtcacaggtcatttatctgccaaattattttcgcttaagagatttcagtccttccaaaaaaccctcaagataattttatgattcaagatttcagcgaatgctgtaagataatagactgtggccgggcgcgattgctcacgcctgtaatcccagcactttgggaggcagaggaagggggactgcttgagcccaggagttcaagatcagcctgggtaacatagtaagagctcgcctttattatttttttaaaaaataaaatatatttaagagaacgcagactgaaacttgagatttctgagtggaataatatcttttccttgcagatttttttttgaagaacagagcagggtaccccgcgacccaagccaagacgctctcaggaagaaagcccagcacgcagccgccctcgcaccctgattgcccccggggcgaggtccccggctggagcagggctgcagaagccgggaagcaacgccgaggaccgagccgaccgatgggcgcatgcagtgaggggaaccggggccgccatgccgggcacgttcccaaagggttgcactgggcgctgcagcgtgggaaacccccgtggcggtcaccactggcgctagctgaggcgagactcaccttgagccgtggccccctcactgctgtaacccgggttccatggctgcatggacagctcaattttcatcagaagggagcctcaaaattctagcatactgcgacccaaaacttacaaaccgcctcagctggcgacctaccggaaaaaaaaaaaaaaagcatgcggcgcatgcgcgtccaaggccgcggaccggaagctggggctcgcctgttgggagccgcgtccgccggtgttggtgtctgcacttggaaggacgtagggaatgcgttgtccctgctaggtacttttcagtcgcagagttctcttcttcttctttctttcttccttttttttttttttgagacggagtctcgctgtgtctctcaagctggagtgcagtggcgcgatctcggctcactgcagcctccgcctcctgggttcaagcgattctcctgcctcagcctcccgagtagctgggattacaggcgcccaccaccatgcccagataatttttgtatttttcagtagaaatggggtttcaccatgttggccaggctggtctcgaactcctgacctcaggtgatccaccggcctcggcctcccacagtgctgggattacaggcctgagccaccgtgcccggccggagtttttctacttaatacctctccatgccaaccccgttgtcatttcccagcggccgcctctataacgggcacttttcagggacaaagaattggtccgttaatgttcctcaaattcgaacgcgcctaggaatagttcggggatcctgttgaagtgcagatcaggattccgtaggtaggggtggggttccaaattctacatttctagtatcttcccacacgatggtgatcctccttgtccctgaatcatggaggagggcaattagggagatgtgagcctggatgcatggtggccttggctatcttaggtgttcttgcccattaaccaagctgggaggaaccgtgtgaatgcatatctatccctgttaataaaagggtagtttgaaggagatgctgacaggagaataattagaaatgtttttcttcccaatccaactatatgcaatacactttataatattcattttagaaatgtcatagataagatttgtaaacattgacatttagcaatactaaatatcactgctaggtctcccctccactttttttttttaaacaaaaatacgacagtatgtattgtaggtcttcataaactacgtcttctgcatagtgtttcatgagcgtttttcaatgtcataatttattttttcctccaacatttattatgaaaaaattcaagtgtaaagcgaagtcgagagaattttacagtggagcagacctcaagagaaggggaaggatggatttcccctctatttagcagtgtctgaagacattttgggttgtcacaactggaaggatggtattggcatggggtaggtagagcacagggatgttcctcaacttcctacaatgaacaggacatcccccgacaacaacaaatttgctggtccaaaatgttgatagtgttgaggttgaaaaacactgacctggagagtacagaattttactctaccagctttgtcacatacctcatcaatctatctgttttcatacatttaaaagtaaactgcagacagtacgcttctaagtacctctaatgcacatcattggagttcaaattaaggattttttaaggtaaaaatgaaatgcataccttaaatacacatcagtttttaaatgcacacgcctatggaactcaagccatattaacatatagaacgttaccatcaccctagaaagttctttcatgccctttcttagttcccaaccagttctccccaaaggtaaccactgttctgattttttcccccaccatacttatttttcttgttatagaacgtcatatggttggagtcatgcaatagatatttttgtgtaagggttctttcactcagggtaatattttcatctgatatcatgtgtatcactttcttttgattgctcagtagtattccatcatatgaatataccagttccattcttgttttgatagaaacctgggctgtcttcagttttttggctattataaataaagctgctgtgaacgttcttatatagcattttattgctcatgactttcttttcaataaatatttatcgagcacttactatattccaggcatttccaggtactaattatagccatgaacaagacaaagatgtcgcatctctcaaagagcttatatttgcacatttctgtgtatgtatgaagagggctaaacataaaggtaaaaataaaagaaaattatgggccgggcacagtggctcatgcctgtaatcccagcactttgggaggccaaggcgggcagattacctgaggttgggaattcaaaaccagcctgaccaacatgaagaaaccccgtctctactaaaaatacaaaaattagctggacatggtggtgcatgcctgtaatcctagctactggggaggctgaggcaggagaattgcttgaacctgggaggcggaggttgtggtgagccgagatcacgccattgcactccagtctgggcaacaagagcaaaactgcgtctcaaaaaaaagaaaaaaaaaaaaaattatggctgggtatgatagctcatgcctataatcccagcactttgggagaccaaggaggatcacttgagcccagggtttgagaccagcttgggcaacagagacccctaactctacaaaaaacacaaaaattagccaggtgtgggggcgtgtgcctgtaggcctgtagtcccagctactcaggaggctgaggtaggagaattgcctgagcctgggaagttgaggctgcagtgagctgtaactgcaccactgcactccagcctgggcaacagagtgagactctgtctcaaaaaaaaaaaaaaaagaaagaaaattaccagatagtggataaactgctgggcagagaagtaaagtaaggtgatgtgagtgatcagatgactgtgttacttagattgccctgtaactggaaggaagtgacttttaaggcatgtatagaagctgggtgtggtgactcacacctggaatcctagtgctttgggaggctgaggctggagtatcgcttgaggtcaggagtttgagaccagcctgggcagcaggcttttgtagagacacggtgacttcaaaaaaaaaaaaaaaaagttagctgatgaggtggcacacacttgcagtaccagctacgcgaggctgaggcatgaggatcacttgagcacaggaattcaaggttacagtgaactatgactgcacttcagcctgggctacaaagccagaccctgtctctaaaataaataaattaaaaataaggtgtgaacagaatgacaataagataccaaccccggaagatcagggggaagaggctttctgacaggaagcacgtggtacaatgaccctaaggctctgttttaaaatgcgtgggggcaaaaagcctgcatttctggagcttggagaagaaagctttaaaaaattatctcatcccactcctgttcttttttgcatgagagctggagcctatgccctaccacacatccgtggatatgcccaggatttgacttgggccttcgaactttgcacagtagctgctactaactttttgagataatacattcgtgggggctcagtcctgcctcatctaaatcaccagagaccaaacaaggaccagcccaatatctcttggactgtaatgtcataatgttgtcagaatacagagaaagatgaaactaagccgggtccggtggcttatgcctgtaatccagcattttgggaggccgaggcaggtggatcacttgaggccaggagttcaagaccagcctggccaatatgctgaaaccctgcctctaccaaaaaaatacaaaagttagctgtgtggtggggtggcacgtgcctataatcccagccactggggagggtgaggtgggagaatcgggaggtggaggttgcagtgagctgaggtcgtgccactgcactccagcctgggtaacagagtgcaacccggtctcaataaataaataaataagtaaataaaacaaaaattatctcagcagtaaaaagcaagagagctagttttcccccaaatttaaccaaatgttactctggtggttagtatgccaccatcttaaactccttttatctgattagtaaggatggacatttattttatgaccaattgttcttttatggtgaattacctgtttacatatctatttttctatagctatctgcaactcccccgacccccacggtagcgattactatcttctctactaaactaagactccagggcagagaggcctatgtttaattcatttgaggaaaggcttggcacaaagtgtgcacttacatattttctttttttctttttgagagggagttttgctcttgttgcccaggctggagtgcaatggagtgatcttggctcattgcaacctctgcctccagacttcaagcgattctcccccttagcctcccgaatagctgggattacaggcgcccgccaccacgaccgactaattttttgtatttttagtagagacgggatttcaccacgttggccaggctggtctcgaactcctgacctcacgtgatccacccgcctcggcctcccagtgttgggattacaggggtgagccaccgcgccagggctcgcacttacaaattttcaaagaatggacagtaaatatttgaaaatcccctcctcccccgcaatttatctgacaccgtctttcggttttgctttaaaaattcactctcgcggccgggcgcggtggctcacgcctgtaatcccagcacgttgggaggccgaggcgggcgcatcacaaggtcaggagttggagaccagcctggccaattggtgaaaccccgtctctactaaaaatacaaaaattttagctgggcgtggtgccgtgcgcctgtagtcccagctactcgggaggctgaggcagaagaatgcactccagcctgggcgacagagggatattccgtctcaaacaaacaaaaaatcactcgctgcgttttttattctgacatggtgcaggaaggtaaattcaagacaacttaggtactcagttttagaagtcgacaggacagaattacggaaacaaatttaagcgttcccccttttagctccaaatataatgtgttccagaaaggtaaccatctaggaaactccaaggctcagaccaccaccggatgcccacacttcaggagcatttatataacttcgtggttatgtcagagacgagaaaacccattgacaaccaaacccctaaacccgaacatccggcgcaagccgcacgcaggcgcagatttactagcgtcagagccgatggtcccgggaggtgggggtggggtggtggtggcctagccacttcccataatgccgcgttccggaagttattgctttccaggggtcactctggcttcgactccgtcgctctcaattcgtcaccaggaggaagacggagctggctgcccagcccaaaggcccatgaggggatgcagttatgggctctgtcgccgtgggtgagttctggtcccactgcctggcagtcgtcgctcgcctggctttctgcgctgggagagctcctgttttccgccccaacttcgttctcttcttgaaggccgctctccttaagcacgtaacccggctactttccggtactgcgatctcattggctgcatgttctgtcagttccagaagctggccaatgagatgccgctgctggcggccttctcgaccccgtggacccagaggttcccccgtgggatcggagcagttagaaggggaggagagggaaggtgtggcaggcgccgagcaaatgggtgggtggcgcgtggcagggacttccctatgggttggagctggatttgcagccgtgttcatacggctggtaggaaaagcaggatctgtcacttatccaattgactatatctaggaggggattgatatacgcaaaacttgaaagccacgttaacacctgctgacaaagttttccacacgcttacatttttaatggaaccgagtaggcaggggaagactgggagggcagagagtgaagagacttggaataatatgagaaccggcaagactatctttgatttagattttgtatggagtcctgcgaagagtcatttcactaagacgttaatgctcatccgatgacactacttgaaaagtgtattaagtttattgatgttttatagctgatggaagtcacaatatgctctcctcatgactcattagttgcctttatagttgtcagaactttactgaggctctttccgcagcactggagtgacccctctgtcctctgcctgcagtaattaacaattcgtctttcaagttttcctatggagtctaagctgctgcaatcctcaaaccagatttactagtgctgtcttcactactgcagacttctgacttctcatttttcacccttttctttttcaccagaacttgtttgcttcattcttatgtacctacctttgcaccttgtaatcatcctttatgcctcaggtactattctatttttctatttcaatgcaagaagtatttcttcaggacctgctatgtactaacattatgctagatattataggcagttccaaaactgtgcttgaaaccatttatttttctaagaactttagattctgcttacagaaataacataaacccagattaaagatttaagaaattcactagaatatgggataaggggacaagatgactagagcataccataaatactggggaagttcagtggagaggtttatttagagtagaatgattgtctaaggcttccttgaaatggagagcttccaagattggtaagatttagatagaatattacagctagaaatcaaagacatcaaggcggggagggtacaaagtgttttggagtggagtacaagagaaggacttggccaggtgctgtggctcacgcctgtaatcccagcactttgggaggccgaggcaggtggatcacgaggtcaggagttcagaccagcatggccaagatggtgaaaccccgtctctactaaaaatacaaaaattagccgggtgtggtggtgggcgtctgtaatcccagctattcgggaggctgaggcaggagaagcacttgaacccgggcggcagaggttgcagtgagccgagatcgggccactgcactccggcctgggcgacagagcaagactccgtctcaaaaaaaaaaaaaaaaaaagagacagacttgattggcaggtaaaaagtggtggtcttgaaacccaaacatctgcattttaccttttttttttttttttttttttttggtagagatagagtgtcgctttgttgcccaggctagtcttgaacttctggcctcaagccgtcctcccacctcgatctcccaaagtgttgggattacaggcgtgagccaccgcacccagacaacatctgccttttagctcatcgtttgtgtgatctttcaccatttttttttcctgacttttctccttgagtgaaatgcctctatttaaagtgttgttatgaaaatccgatgtgataatgtttgtgaaagggctttgaagatcaaaagcactatatagttataactttagtggttttttttgttgttgttgaggtgtaatagaaagtcaggattagccgagcaatggggccgaatttataaaggcctatgagtgcaaagtttagggagtgtggtccaggaaactgttaaatgcttccgatcaagagagtgatatgataaaaatggcataactgggagatgaatctagtactgaactcccacatcgattagagtgagttggattggaggcaagaacttgggtgctattttatgtatttatttctaaaatctataattctatataattaggtagacctgtatgtacttttagcacttttcatgttttctaagtttgaattgttgactaaaaaagtgaagatttgatgtgcagctagatttgtcaaatagccttccaaagtggttttggcaataatataataatgtaaatagttgagaatgcagttgtaatcaattttcatttagctgatacgcataggaaatcctggtgtggaaaatgtacaacagtgtatcactttttgtatttggctttgaagccattttggaaattttctaactcccttcaggaggttgttagaattatttttaatttttattagagaaattatcagtttaatttgcatagactgcagagctaagaaaggtagcttagaagggaagcaaatcagttttctgattaaagtgctgccattatttcacatgtatgtagtgaggagtcaccttcctaagagtatcaagttctgagactgttcaagatctgtgtaagatgaccaaggttctctcctgacctttacatatattgaaaacctcttaagcttgctaagaatcactttcctatgctatgaaaaacgggagataactattctatctacttgagttcctgttgaaaattagatgattatatgtgattggtctttgtaaattacaatgtgatagacatgcataatatacgtggcttagttatattactgtctcctagagaaatataagacatacttttttttttggtcaagctaactttatcttgttttctagattgttattttgtgtcagtaagtaatccataaagtgccaacatgggaaagaaacggacaaagggaaaaactgttccaatcgatgattcctctgaaactttaggtatatttcattgattgaatctttaatgtttatatctctaaatgaatatgttttaaaatgtaaaaatggtataaagctgcatattattgttatattatctgcattttaatataatgtttgtatctatatgtcatttaatagtcttctacttttttttttttttttgagaaagaatctcgctctgttgcccaggctggagtgcagtggtgcaatctcagctcactgcaacctccgcctcccaggttcaaacggttctctcgtgcctcagcctctgagtagctgggattacagacacatcccaccacagccagctaatttttttttttttttttaatagtgacggggtttccctgtgttggtcaggctggtcttgaactcctggcctcaagtgatccgcctgccttggcctccaaaagtgctaggattacacgtgagagccactgcacctgactttctacatcttttttgttttttttcctgagacggagtctggctctgttgcccaggctggagtgcagtagtgtgatctcagctcactgcagcctttgccttgagggttcaagcgattctcctgtctcagcctcatgagtagctgggattacaggtgtgctccaccacacccagctaatttttgtatttttagtagagacagggtttcaccatgttgaccaggctggtcttgaactcctgacctcaagtgatccgcttcctcagcatcccaaagtgctgggattacaggcgtgagccaccgcgcccgaccttcaacaacatttttaatggcatattattgcatttagcaaagaccatggatgtatatttcataatttatttagataattttctactgttacagatttaggtaatctttaactttttagtattatgaatggctcagtagtaaacaactttatagctaaatctctctgtacatccaaatattttcctaatacacatacataatttttgaatcgaagggtgtaaacatttttaagactcttttgatcctgttgctaaattgccatccagaaatgttttactaatttccaggccccctattagcgtagtaaagtgcccatttccctgaaccttcatcggcactggttagtatcatctgtaaacatctgtgctgatttggtagttaaaaaaggttaccttctgaccaggtgtggtggctcacgcctgtaatcccagcactctgggaggccaaggcgggcagatcacgaggtcaggagatcgagaccatcctggctaacacggtgaaaccccgtctctactaaacatacaaaaaattagctgggcgtggtggcgggcgcctgtagtcccagctacttgggaggctgaggcaggagaatggcgtgaacctgggaggcggagcttgcagtgagccgagattgtgccactgcactccagcctgggcaacagagcaagactccgtctcaaaaagaaaaaagaaaaaaaagggtaccttctttttctagtttgtatttctttgactactgagatttggtagtttttccacctgatcccatttgcatttatatttcttttcttggtgcaagatcattggacataaagctaattatgccacttgactagtttctaaacctccagtgttcctggaacaactcagcactgtagagtggtttgcaaagctctttacttatcttggccccaacagagttttcagcctcaggttcaactgctcatttttgcacattgtgtaactccatcatctggggagacagcatgcactttcacatgtttttgttcttggcatgggcattttcagattgcccttcactccctgaggtcgcagtttaaagtgtgagctatgaagtctgaaagacttgagtctaaattctggcatagatactcagtagttatgtgggtactaaatcttagttttctcatttgtcattgggaataatagtgtcttctagggtgattgtaaggattaaatgggataatgtattcaaaacatttaacaaagttcataggacatatttaattaatatcagcaatttttattactattattatcttctaggattgcacagatgttacctcccctgtgaaacttttggtgactttagccttctctgcttgtgctgctataccatgtttcggagattcttatacattaatttatttagctgcctttccttccagaatgtgagctactcaaagaaaacagctgtgacttggtcaattttgggctcctgagcgtctagcacagtgcctgccctatagtaggtgtattattgactaaatgaaggacgttttctacaaatctttaaagataaagagaatcataagtatgataaagggccttaatttaaaggaaatagccaaataaattgaaatgaatttgtagtgggggacagtggtggttatatttaggacttcaagaaagcgaaacttcacaaatttgtgtcaaatctctttctcacatatttatctcatattattcaaatatcaaacaattttaagttcagaatatcttaacagtttatagagtaaatttcatttttgaaatgtgaatcgagggtaagttttgagattaactgaagaaagtcatttttgaccttatatattccttgtctattatttgttttaatagaacctgtgtgcagacacattagaaaaggattggaacaaggtaatttgaaaaaggctttagtgaatgtggaatggaatatctgccaagactgtaagactgacaataaagtgaaagataaagctgaagaagaaacagaagaaaagccttcagtttggctgtgtcttaaatgtggccatcaggtatgcttacgttttaagatcaatatgggattttagaaaactctttgaacttactttagaaggtattacctgaaagtacagtatggataaaaggatactagtaacatagatcatgttctctggagaaccagttctgagatgtgtgtataggtggtggagtgttctctggtaccacaccagtaaaagtaagggaagcaagattaagcatagggagaagttgaatgaagaggcagtggcaacagggtctcagccaatcccacagtgatctcttgcctgaattgaggcaaggagctagacctttctacctgtgcatagaccagtcattggatgtggcctgcccctagagcaggaagtaaccttgggcaaggcagctcccttttgttgagactgattcctggggatggatggactagactgtgagctctcagccggccacattctcagcacctgggggaatgagtagtaccttgatctttggcagtgagggcatgtctggctggcacatcacagtatctactctaccagctcacagttattaccgtggtactaaagtcagggtctctcagttacccttagtggtggcaagttaagcttatatgttaggaaattgggctactaggcagtagtcatgaagtcatgaggcttcaagatcaggcagatagccagttttttgttgtttttttgagatggggtctcactctgtcacccaggctggagtgcagtggcacaatcttggctcatggcagcctccacctcccaggttcaagcagttttcctgcctcagtctccaagtagctggaattacaggtgtgtgccaccacgcctggctgagttttgtatttttagtagagacagggttttgccatgttggccaggctggtctcaaactcctgatttcaagtgatccactcaccttggctccctcaaagtgctaggaatacaggcgtgagccactgcgcccagccaggattttttgttttttcacgttttcaaattgaaaatcttattgaggttattatagatcatgtgcagatctaacagataatacagagaaatccctatgcatttttctcagagtcccccagtggtaacattttacaaaatgagtataatatcacaaccaggatattgagattgaaacaacacaccaatcgcaatcagatctcctgagtttgacttctttttttgtgcatgtgtgtatgtgtacatgtgtattacattctgtacacttttgtcacctgtgtagattattcaccaccacagtcacgatactaaatagttgaacatcacagggatctcttgtgttgcccttgtataatcatacccacctccctactgccaccactctctgcagcccctggcaactaccattctattctgtatttctaaatttagtcatttcatcaaaaatgttatgtaaatggagtcatacagtgtgcaacatttggggattggcttttgcttttttctttttttgaggcagggtctcactctctcacccaggctggagttcagcggtataatcacggctcacggcagccttcacctcccaggctcaagtgatcctcccacctcagcctcctgagtagctgggactacacctgcatgccaccactcctggctaatttttgtattttttctaaagatgcggttttggtatactgcccaggctggtcttgaactcctgggctcaagtgatctacccccctgggcctcccaaagtgctaagatgataggtgtgagccaccgtgcccagccaggattggctttttcactcagcataatcacccaaagatttatcaaagctgtgtgtatcaagtttgctctttttttattactgagcgtattttatggcatatagtacaacagcttgtttttactgtttacctgtcgaatgacaacatctgggctgatcccattttttggtgattacaaataaagctgctgttaacatttgtgtacaggtttttgtgtgaacttagatttcatttctctaggataaatgcccaagagtgcaattgctgggtcctatggcaatttaatgtttagttttttaagaaactgccaaactgccaaactgttttttcacagtgactctaccttttatattcttactagcagtgtatgaatgattcactttcactttttcttcatttttgccagcatttacaattgtcacagttttttattttagccatcatgatagttatatactgatatctcattgtggtcagttaaaaaaatctgtatgttagaaaagatactgtttacttgtatttgaaaggtttaattgtaaccttttaaatacatatggtgagtatgaatatgctttgctatttcagtttttcagaatatattttgtgttacaaatttttgtgctacctttttaatttgtaagaataagacatgtcagtattaactgctaacttttttcccactagatacctttggcactgttagctaatgattcttaactgttgtctcaagacaactatgtttcaaatgatctcaaatgatgttgtaattttcaaaaatagtatcaaatgttaattcatttattttgtaattaaatgttcagtgggataaattaagcgaatagtgtttgggatcatagttaaggaattagaaattaccaatgtatatttcttctccaaagtatatatttagcggcaatggaaacacgaccggttgttgtactgtgatccaaaagttgatagactggttccagtagatacacagtgaagatatgtttctcagcagtgatctgactagctgaaagcagaagtttaggtcatgttcttttatgaataagcctatacatcttttaggtaaaagtctcccatttacttgtttaaatagtgttttttgaccacctcctgtgttctagaatatttggtaatagattaagtctactgccttgagcctttgggatttatagaccaggtgagaaaggatataaatatcaataacgttagtacaaggtaaaaaataaggaatgccactaggaattcatgccatgttttatagaatttgtttaaaggaaggagacagtattttctcatctgggagataagtataggcttctgggaggaggtggcttttgagcaagatcttgaagagtgggtgggatttggttaggtagcagtgttcataaaggattctggataaatagaataatgtgaacaaaattgcatagttgtgaaaagcgctcagtgtgtttttagctggtcgttggtatgtgaataagagaatgtgggagttaacactggagagatatgtcggggtcagaggatgtcaggtttgtttattaggagtttaagagtgcaattcataatttttgaatggtgtatgaacagagctttgttttaggaacactaaactgaaagaatatgcatgtgaagaaggaggctgaagttaggggaatgtttaggagactgttaaggaatccaaaccagacttgactgcattagtgtggtttaatctgggctggaaagttggacaagaagagtactttgagtgcatggttttctttttttttttttttttattttgagatggagtttttgctcttgttgcccaggctagagtgcaggcccagacgtgatcttggctcactgcaacctccgcctcctgagttcaagcagttctcctgcctcagcctcctaattagctgggattacagatgtgcgccaccacacccggctaatttttgtatttttagtagagatggggtttcaccatgttggtcaggctggtctcgaactcctgacctcaggtgatcccacccctggcctcagcctcccaaagtgctgggattacaggtgtgagccaccgcgcctagcgagtgcatggttttctaaatacttgttgacttaaatgttctcagttgcctgtgcatatgtaagttttaacaaaatattgattctagagtctaacattttcttttcaagattgtaagaatggcagaatttcatgagccacttccttgtttatgatagattatgcattctcccctcttgctgagtttttatggctttgaggtttatgattatgatttttttagggctgtggcagaaattctcaggagcagcatgccttgaagcactatctgacgccaagatctgaacctcactgtctggttcttagtttggacaactggagtgtatggtgagtttcagttcctctgcctcttgggtggaaattatttgaaatattagagaatggaaatgtttaaatatgtttaagaagaaagcaatttaaaatttttgtagtatgttttaaaataccatcactttcacaaagctaaagaatgcagtattatgagaagcttttacttggacgtttgcacaagcacaaacattgtaacatagaagacttaagaatctttacccctttgtttttcttgcttgtgatattataaggcatatagtggagatagggacgctaagaacaaatttcagataaaattgtaataaaattttggctatgaatttgcatgaaaataaatgtcagtctggtatgttatagatgctgcattgtaacatcattaaaacagatttttacgtcttaaaaatcattttcacagtagtcttcactgaatgacatcttttttttttttttgagacggaatctttctgtcgcccaggctggagtgcagtggtgtgatctcggctcaccacaacctccgcctcccaggttcaagcaattctcctgcctcagcctcccgagtagctgagattacagggatgcaccaccacgcccggctaatttttgtatttttagtagagacggggtttcaccatgttggtcaggctggtctcaaactcctgacctcgtgatccccttgtgatccgcatgcctcagcctcccaaagtgctgggattacaggcatgagccaccgtgcctggcttgaatggcatctttcaattgtaaaagttgttacttttgtctggctaacacgttgaaaccccatctctactaaaaatacaaaaaaaaagtagctgggcatggtggtgggtgcctgtagtcccagctactcgggaggctgaggtaggagaatggcatgaaccagggagctggaggttgcagtgagccgagatcctgccactgcacgcagcctgggcaacagagcgagactccgtctcaaaaaaaaccaaaaaacaaaacaaacaaaaaaaagttgttatttttgttagtgttattctgtattttaaaatatatgtaaacaatcttttgacttcaatgttataaccagtaaagtaaaacgtttggagtatttcatcatactacttatatgcagccataattctggctaattttattaataataaaccagagttaatatgcatagtcttcttcaggaaaacagaatttttacgttcggtttctttaatagaataagttggcagttacacactttgattccaggaattattatttgtctccccctttttagttgtcattttgtcatttttcatctctgatttttgggtcacaggtgttacgtatgtgataatgaggtccagtattgtagttcaaaccagttgggtcaagtggttgattatgtcagaaaacaagccagcattacaactccaaagccaggtaaaataatttgtttctttaatatacaccaaatgtcgatttgtgtatctgctgatacttagatttgttatactacctagcattacatacagctgagtaacattagttatggttgattgcaaactatgaaactatttttggtttaactataaggtattagaagggatatgagaaatgatctagtcagatgtgatgaaggccatagactaaggtaatggccattaatgctaagactaaggtaattcccataaccctagccaggcttactatagacctgccttacactgttcttactgtcgtacattttgtaatagcaagatttcagtctgtctgctgggataacataaagcatttgtgattccttctaatggtcagatatttcttaggttctttccatgcataattaaattaattggctgacatacagcatttgctttaagcatgttttttaagtttttattgtcacaagtatctttgtcagagccagaattatttgttttttactttaggattgatttttgacccacagaattcattaaaaaatttatttcatgtccatgttcttgattgttttatattcttaatttcacaaggtaagatgtgttcatttgtaaagaattttcgtgcagtaaaaaagggagatttataccaaagcacatactgtttggtttcatttatcaaactaatgcttactttaggtctgagtattttttgtttactgggttttgtgttttttttctggatggcaatttacctgtatctatttaaaatcaaatgggtgggtgggttggaaagaatgacttcaggtaaactcacaaactctagtactgtttcccaagtatacttctgcattcgatatgactgtattacacattttgctaaatcttttctttttttaaagcagagaaagataatggaaatattgaacttgaaaataaaaaattagaaaaagagagtaagaatgaacaagagagagaaaagaaggaaaacatggctaaagagaatcctcccatgaattctccttgccaaataaccgtgaaaggactcagtaatttgggaaacacatgtttcttcaatgcagttatgcaggtacattgtcatttttttccctttaaaaaagctgtccttttcctcatagaatctgctacttacattattgagttttttccacctgagtaatttatttctatgtatccaaagaaaactttttttttttttttttttttttttgagacagggtctcactctgtcactcggctggagtgcagtggcacgatcgtggctcactgcagcctctacctcttgggctcaagcagtcctcctaccttagcctccagagtagctgggactacaggcatgcgccaccactcccagctagtttttgtatcttttgtagagacagggtttcgccatgttgcctaggctagtcttgaactcctgggcttaagccgtccaccccctttggccacccaaagtgtttggattacaggcgtgagccaccatgcctggccaaagaaaacttaaggaaagttttattgcatgacagtaagagagtttggtgagcactcgggtgcagtgggtttgaaagaaatattgctgcttctttcatggagcttgcacttgggtggaggaaacacaggataacctcatatagaagcaaatacgtacctacaggtagtggtaagtggttgtgagagagtcatggtggaggattggggatagctacttctgattgggtggtgggagaatgccccactgaggtgatgaataagctcagaactgaagtagttatgacccaaatagagtagggagagaagcatctgtaacttttcattttccaagtatagagttttcagtgttggtcatgattttctgttttgatagaatagacacttaagaagtgtcagagttgatttgcctttaaataatttttctctttttttttcaccctacattctagaacttgtcacaaacaccagtgcttagagaactactaaaagaagtgaaaatgtctggaacaattgtaaaaattgaaccacctgatttggcattaacagtatgttctttaaacttttctagtctgtaactttcctctctgaatgtgtgttttctaaattattttaaataactgacactcatttccactgtttttgtttgttttgttttactttaggctactaacttaaacagtttcaggctaatagaagttataaggaggcattacatctgtttgctgtgtgtgtgctctgtttttctatgctcgagtgttaagcttccttcttgggaatgtgtatatgtttgagaagccttaggcttacattattatttttaacatctttaaggtgacttaagagctgtgtaaccaaataaatattaccttatccatttttattatttacattttgctttggctctttcaattcttaggtagtaagtgttccagataatctaaaactaaaatagtagagctgaattctgcataagacagtctgtgaccaaacagtttctatctcttttgatgtacattttaaacttttaaatggggcagttctgtcaggaacattggtagtatatgttaactaattagattttagtaaagtcagtgattccagaatttgactgaagaaagtaatttcttttcccatattcaggaaccattagaaataaaccttgagcctccaggccctcttactttagccatgagccagtttcttaatgagatgcaagagaccaaaaagggggttgtgacaccgaaagaactcttttctcaggtctgtaaaaagtgagtatccacttcgattgtgctttcagtgcctcagtgagatgctgagaaataatattaatattaaatagtaaaatataaaaatattaatagcattacatttagtcaaccctctatatacaaaaggcatagttttttttcatttggattttaaaatatattttatgtgatagttaaatctcccaagggtgttaatggactaaacggaaatttgtagaaaccagaactctctgagatttgggatatgatcctaagattttctaaaaatagcttcagagcttagtagactgaagattgcttttctgtctttttgtttttctctagagcagtgcggtttaaaggctatcagcagcaagacagccaggagctgcttcgctacttattggatgggatgagagcagaagaacaccaagttagcatgttatgaccattgtattttatgatcttatcttcataagctttctgtctcatttgatatcttacgagttaaaacaatgaaagctagttattaaggccatcatactttaaaattttttcttacaccagctttttcaactagtatgttttcaccattagaatgaatccagagaattagcagtaattctctttctcatgatggcttaagtttagttgatgtttacagcattaatgttctttaaagattctgttgtactaacctatacgaagagagctgccaaatattggaaattgtttctcccaaacccaggtgcagcacacccttacttttaattctgagtctgatttaatactgttttttgaacctaggaagtattttcattttgtaagagtcagggaacattggttgcattttaaaatttttgttacttgccaggatataaaaaaatgtatttggggtatgaattaatgagtactaataatagtgataataactaatatttatttcgcacttatttttatgccaatcactgttttcagtgttttgtattaattcccttacttcgttctcacaaagtttctgtgaggtggatactgtgattttttcctattccatagattgagaatctaggctgtagagaagttcagtacctagtttaaggtcccccagaaataatggagctgggctttaagcactggagtcagaccctgtggctgtcatgtaatcattgtgcttgtaggacaagctatttcagtttcttctcaaaggtggtgggcatgttctgaaaacctttggcttgaagaggtttaagatcttgaaatgataagataatacctttattcaatggttagtgattgctttgtgacataattcctttttagctccttgaattaagtttgaaaatgtgattttggaattatttagtaaatatggggagctgtatcctgatcactttcttgacttgattacatatttctaaggaaaataaaatttaaaatttaatagtatatatatatccattttattacttttagagagtgagtaaaggaatacttaaagcatttggtaattctactgaaaagttggatgaagaactaaaaaataaagttaaaggtaatgtctgactttttgaactaaaacactatagttgaattcctctgtaccttaggacaagattgctggcacatatatttccaagtccacaattattaatgtataatttctctttatcaacgttgattagtaaaaattattcagtgctccagaagtgaacagttttaccccatggtgtattctttttatgtattaaagatagaactatgatgaattacagttttacttttcaaaagcttaaaattataattagcagtaatacatgaattatatttgttactgtgagttgtcagtagttggtttattaatcatggagccaacttagttcttattatgtggcgtgtaaagatttagggcagatctgcccagtagaacttcctatgttgatggaactcctctatacctttgctgttccatatagaagcaactaggcacgtgtggcgcctgaaatgtgactggtgaaactgaggaactacatttttatttttatttaattgtaattaaatttaaatagccgtaagtgactaagggcactgtattataaagcacagatttgaatcaactcatagcaactctttgcctccttggtgccctttagagcctggccagtaatggagagaattacccctgctggcattttctgtcagaaaagtgtggttctgcataaattatcatttgaataatgcttataggtttcacgtatttggaaaattggctgatcaagtagtaaaattatggcttttagttatattaaacttatcaagattatttctgggagcataggaaaataaaaggaagattttgtttgaaatattttcctgaggtttttcttttgtttttaaaatatcaaaggagttcagtcttagagttcacaaaacaagttacatgcattttctctcccagtttgctactctggtatcttttatcagtcttgaatgttagaatgttagagctagaactaaggaactaggctgtcattcagcctactctgagctgttcattttatactaatggagagagagagaaagacatagaagtctcactgacttgcacagtttacttcccactgactagatcttggataaggacttttttgtcttattcataaaaggcgattgtgttcaattatgttatgctcagaggtggaatatataatactgacttctattgcttaaaaaaggtgattatgaatggaggaagaagtctgtgggacaggaaatttaaaataaaattttagagttagataggtaagtagttttagcttttcttgtttaattaattatataacggtaattggtaattgatagacttttttttctccatagattatgagaagaaaaaatcaatgccaagttttgttgaccgcatctttggtggtgaactaactagtatgatcatgtgtgatcaatgcagaactgtaagtagatgtcatgtatactgggtttatttgctaatattcaacagtttatcaattgtttatttcaaaagcagaaatctctaccttcataggatatctttttaaactattcagatgctattcagatgtgcatggttctttgtgggaaatgtcagcactccttaaatcttgaagacgttaaacagtttgatttatttcccccaacccaaagtcctcaatgttgtgtaatttttcatttcaaattttcttaagcctttgtttattttaaaacccatcccctactccccatcccacagggcagggaggatcttactatgtaacatttacagtatttacatttttacactgtcttttctgattggttaaggtctccttggttcatgaatctttccttgatttgtccctcccagttttagatgatcaggtaagactattgaatttattttattcaagtagattttttttcctgtaagattttgtggggggaagccttgttactctttttaagtttgtatattactagcccatgcagaaatttttcttaatttgaggtagaatgcattttaggatttgaataaagaacagggtaactactttaaaaacaaggatggaaaaaaagatgatgtattcagaattctgtacaagtaattagtttgattggtttccatacagtgaagtattttccttatattaaaattaatacttatttttgttatttaagactaatcacgaatcccttgcacacctaagttcataaatgttaaagagtattattttgttttaatttggttccttttaaatagtagtaggaaaaaagaagagatgttatgagtattggataaatcattcttcaacttcatatgaattatgagacccttggcttgttaacttggcaattaaagtctcaccaaattttattttctgtttttctgaaactgtcatatgcatgcaaagaaagaaaagaataaaaaagaatacaccgtggtgacttacataagtcacttagaaaatgtatttggaaatggacgtatttacagtgtgacacagcatgtatctaataaatttcgttatatttctattacacttacatgtgatgttgccttttgctgttttgttggtttgcttgttttctcattatgtgaagattgctttctagtgtatgagataaacgaattttgtctcatctattttcaaatattgtggaaaaaaaaagctaatacataatagaagtagaaaaatatttacatagtgtggattttttttcaccaaatggtagttgtaaaattttgtttttgacctatgttatctatattttaagagtggtaagaaaagtgtaaatgataaaaatctgaaaaagacagtggaggatgaagatcaagatagtgaggaagaaaaagataacgacagttacataaaagagagaagtgatattccttctggaacaagtaagcacttacagaaaaaagcaaagaaacaagccaaaaagcaagccaaggtgggtaattaggaggaaaatcatatgcttgtaattttatattttgagctattgagtttgtagtctgaatgacattggttagacatgtctgttattttagatacagcactttcatttgacaattacagaatttagctcatttagtattctctgcagggaaattgctttgagtatatgtgaagaaaacgtcgtgcttctttttttttaaatcctgcattgcttgtaacaagtatttgtagtaagtttaattaacttaattttcgagttaatattattgacatccacaaatttaaaaatatataaaggtaaacaataagtccccctcccaccactgttttttttttccaacccgagatggagtcttgctgtgtcgcccaggccagagtgcagtggcacgatctctgctcactgcaacctccatctcctaggttcaagcaattctcgtgcctcagcctcctgagcagtcaggactacaggtgcatgccaccaagcctagctaatttttatatttttagtagagacagggtttcaccattgttggccaggctggtctcaaactcctgacctcaagtgatcctccctcctcagcctgccaaagtgctgggattacaggcatgagccaccgcgcccggccgaccaccactttccttttatgacaaagataaacatttttgttttttcttacgtatccttctggagtttcttttggaaaatatgagcaaatacaaatatgcagtcttggtttttttccccctttctcaccattcacaccattctggattgtgttgtttgtttatacttagattcttggagtcctttccattttagtatataaaacttcttcattctttttttttttttttttgagatggtgtctcactctgtcgcccaggctggagtgcaaatggcgagatcttggcacactgcaacctctgcctcccaggttcaagtgattctcctgccacagcctcccaagtagctgggattacaggcatgtgccaccgtacctggctaacttttgtatttttagtaaagacaggtttcgccatgttggtcaggctggtctctaactcctgacctcagataatctgcccacctcagcctaccaaagtgctgggattacagatgtgagacaccgtgcctggcccattctttctttctttctttctttcttttttttaacagttgcatgattctgtgttatggatgtgccataattcatttaaccatttctctattgatttaggttgtttctagtattttgctataatggtgagtgctctagtgaataaccctacacataagtcatctgtagggtaaattttgagaagagggattgcatttgtagttttggttgatactaattgtccttcacaaaggttgctcctgacccttgacagctgtgtgttatcaaacttccagattttgattggtatgttagatggaaaatattatctcagtgcagttttattttacatttattttaatataaattagattaagcatatttttatgtttcagagccatttgcatttcatgttctttgaagtttttgcttatattcttttcttattttttattcatgtgttcctctgtttttacggaaacacatcagaaaatgtttggttcccatcctgtttgctgcccttcattcttctggtattacagagtagcctcacaggggctgttctttcagttctttctgttacaaccagaaatgcctttgggtttttaggcatttcagtaacaggaatcttgatgaaatgccttcttttcctctatttggaagtaggttgcaagtggcaagagtgattttaaagggaaaagttctttactctcttctgtatgtgtggctaccttgcttctttgctaacttcaggccatttttttcccagaatacttttgtccattcctctgaccaaagcagtcctgtacttgtgcatccttgagttttctttcagtttgtttttttttttctctcagtgaaaccttgacccagtaactcatatggatacatttctttctgttagtgtggagtcagacccaccgtgtggtataacatttgactgcctgggtttaacagtcttagtactctgcctggattacttcccttagcacagagaccatgtcttgcatatttttatttctacagtagggtggttttttgatggttggtgatggtttattcctgatttcatttaaataactttttctttcttttttttgggaacagagtcactttgttgcccaggctggagtgcagtggtgtggtctcggctcactgcaacccccaccttccatgttcaagctattttcctgcctcagcctcccgagtagctgggattacaggcgcgcaccacccatgtgtgcattacaggcacgcctggctaatttttgtatttttagtagagatgggttttcaccatgttggccaggctggtttcaaactcctcacctcaagtgagatgccctccttggcctcccaaagtgctggggttacaggtgtgagccaccacacctggcctaaataacttttcttcataatttattttttgagacagagtcttgctctgccacccagtttggagtatagtgtgcatgatcatacctcacagtaaccttgaacttttgggctcaagtgatcctcccacctcaacctgctgaatagctgggactacaggtggacaccaacgtgcccagctaatttttatttttatttttttttagagatggggtctcagtatgttgcccaagcatgtcccaaactcctcaagtgatcctcttgtgatcatcttgctttggccttccacagtgctaggattacaggtgtgagccgccatgcccagccaatttcgtcataatttttttgatccttgatagcaaaggaactttttaggatcagattgtgagagtgaactcttccttaggaaattatttttgattgacaagcagcaaaactggatatagtacatgtgtgtgttttgtccttcttcctctatctctcttcctccttttctcccgctctttctttttctttattttttgatgccgtatactttttacccagaaccaacgaagacaacaaaaaattcaaggaaaagttcttcatttaaatgatatttgtactattgaccatcctgaagacagtgaatatgaagctgaaatgtcacttcaaggagaagtaaatattaaatccaaccatatttcacaagagggtgttatgcataaagaatattgtgtcaaccagaaagatttgaatggccaagcaaaaatgatcgaaagtgtaactgacaatcaaaaatccacagaggaagtagatatgaaaaatatcaacatggataatgatctggaggttttaacatcttctcccactaggaatttaaatggtgcctacctaacggaagggagcaatggagaagtggacatttccaatggtttcaaaaacctaaatttgaatgctgctcttcatcctgatgaaataaatatagagattctgaatgatagtcatactcctggaacaaaggtgtatgaggttgtaaatgaagatccagaaactgctttctgtactcttgcaaacagggaagttttcaatactgatgagtgttcaatccaacattgtttatatcagttcacccgtaatgagaaacttcgagatgcgaataaactgctttgtgaagtatgcacacggagacagtgtaatggaccaaaggcaaatataaaaggtattttaatgctctcactgtaagtaaaattaatattcaggggcacattttgcactgcataggtagagtactcctaattgtatcaggatttggatggcatgaataagtgtccttttctgtgtaaatattttaataggatggaaaagtaggactttattgaagtggctaatacactgtgacatcccagcagcagttaaatgggacagttttctccctgacatctctccctgtgggtaaattatccccttggaatgcagtcaccacagcatcctgacacatagtggctatttttttccacccttacctcctttgcacccaggacgccacacttgaatttatcagtgaactaatatgacatgcccagtgcaaagcactgggaagacagtgctttcttacagtcttcctcaaatgggagaaaggatcatactgacaatttcccttatctccccattgcttttttttttgagtttgggtaaataggatgtggaggggccatggattcctaaggatttttagtagaattgttgaaacattttaaaattctaagtagaattttatttatttacatatagagacaaaaagtaagcctgtgtgtgtgtgtatgtatcttatatgtgtgtgtatgtatatatatatatgtgtgtgtatgtatatatatataagctcagagactatacaaaaataggcttactttttgtctgtatatatatcagctcagagacgatacgtgtgtgtgtgtgtgtgtgtgtgtgtgtgtgtgtgtgtgtgtgtgtgtgttttgagacagagtcctgccctttctcccaggctaaagtgcagtggccaatttcagctcactgcaatctccacctcccgggttcaagagattctcctgcctcagcctcccaagtagctgggactacaggcacccgccaccacacctggctaatttttgtatttttaatagagatagggtttcgccacgttggccagggtggtctcaaactcctaacctcaagtgatttgcccgcctaggcctcccaaagtcctgggattacagcgtgagccatcgcacccagcctaaaaaatattttttatagatgagcatttgcaaatgatttgatgtgatggaatatactaaactttcaacctcattaaccaaaatattgtgtctctccacagtaattcaattttgctctgattgtaatcattctcagttattactgtattttgatttcatcagtaagaatttatggacattttaatctcataaatacctataaaatatctttgattttgcctcttactccacaaattctacaatatttgttatctagtacttcatagaaaaagtttactgatccttgctttagatgtttggaatgattttatagcaaatctgaatgctttaggggtctaaaatgattttctccctgttaaaaatttcttcttttctttaggtgaaaggaagcatgtttacaccaatgccaaaaagcagatgctaatttctcttgctcctcctgttcttactcttcatttaaagagatttcagcaggtactccttgttacccaaaatttgttttaaatatgtaacacctactttattacctatttttttcattactgtctcaacatactactttgtttctttggttttctgttgtttcttaactgtaatgtcaatgaagtcagaaagggaaaaacataggggctaggcagaggcgcatgtgaagatggaggcacaatctcctcagatttcctagaactcatttatgtccctctttttagtacgattggcatcttacttttatttcaggttaaaaaaagaaaaagactggtgtgttacatatatctcatgcttaggaatattagtgattttttctgttttgtgtgtggcatcttgtttttacggacccttgataaaaagacattggtgccttggattgtcatcattttggtgacctcatcttttctggaaaacttttgctatagctgtataacttctaaactgtgttgcaaattccgaaagtactttcagtatcttcagaacgttttgcctcttgtggttggtatgggcttgactaattgggtgggcctttattaacaattcactaagcttggtttgagcatgaggctgagagcgtgtgtttcacagaaaagtattatgctatcgctgagttttaagcactcagaacctgtggtctaatctggcatttctggatggctgaagcagaaacattgagaattttctcacgagaaaagttgtttttcttctttttgaaacagtcttgttctgtcacccaggctggtgtgcaatgacacgatcatggctcactgaaggtttgacctcccagtctcaagcgatcctcccaccttagcctctatagtagctgggactataggtggctaccaccatgtccagctaattttttaatttttttgtagagacagagtctcacagtgttgcccaggctgatctcgaactcctgggctcaagtgatcctcctgcctcagcttcccaaagtgctgagattacaggcatgtgccatcgtgtccagctgggaatagctttcttaatgtgttggtgtgtgttttttgtgtgatacatgtgtacttagcaaaagcaaaccaacttggaatcagttagtgttcaggaagaattgagtctccaaagaaaattgaactaggacttaatgttgatattcttttggacgtcggaggggacttcggtttacttaacctgtattgcttttccaagaaaagaagtcaatctgttatgcttctcttttaggctggttttaacctacgcaaagttaacaaacacataaagtttccggaaatcttagatttggctcctttttgcacccttaaatgtaaggtaagtcaaagtggtctttttcaggaaagtcctttaaagtcaaattgtggcttacctaatgctccagtagcaactcacttaagtatgaagttgataacacttattgagtagagtgggtctttgatcattgtacctttataatttgaagattagtgatgaatcattttgaagaatgggttatttcagttcaacgtttggaatcccctttattatggcatacattgtcttgtgagcggagggcataaaactaaaggtgagcagatctattaatgaataatctgtttaatgtggttgaatgttaaggctggtgaacataggtcaggagtggtatacacttaacccagcatgttggtggttcaggaatggctttgtaaagtaaaccatgcctcaactatatttaaagaaggagtaaaagtatgatgaatcaagatgaaatgagttttgcaggcagaaggaacagcaggagtaaaaacagcagtgtaaaataggatggtgattgccagagactggtaacgtatgtagttctagagtttatagtacaaggttatagggagagttgagaaatgaagccagagaagtgagataggaatgaagttttggagggttctcatggtgaggaacttggacttcattaggtatacagtggggagccctgaggagtttaaagcactggggtggcatggtcagatcttcatatgacgtaggttacttgttgatgtatgaaggctgaattttaggacggaaagactagaggtggggaagtgagtttggaggctgttgtattaattcagccagtagttgatgagggcttaaagttgggcaggagatggggagatagaaggaatatttcaggaggtagaattaaccagacttaatgattgattggcactgtaaggtgaggcagaggccttttataagtggatgctgagggtggcagagaaagggttgaggatgattcctgaggcctggcacgacagatgggagtgctgtaaattgagataggatatatagggagaaaagcaggttgagaaaagcaggtagagaaaggataatgacttcagttttagatacatttgagtgtcagatacctttgagaaattaatgtgcttagtctagaaaacatttggatatacatatctgagacctatagcagagaggttaggatgggcccagggcacagatttagaaatcagtacatatgtggcagtttaaactatgagaagatgggatcccttgtgtatagagtctgaagagagaaaaaggagatggccaatgacaggaccctcctaagtatctgagtggaagaggcaggggtagaaagtgaggacaccacaaaggatctcaaagaatctccatgttgaagaatttggggctgggcgtggtggcttacgcctgtaatgccaacactttgggaggccgaggcgggtggatcacttgaggtgaggagttcgagaccagcctggccagcatggtgaaaccctgtctctactgaaaatacaaaaattagccaggcatggtggtgtgcgcctgtaatcccagctactcgggaggctgaggcaggagaattgctggaacctgggaggcagagctgcagtgagccgagattgcgtcactgcactcctgcctaggtgacagagcaagaaactccctcaaaaaaaaaaaaaagtctgggccagttgctgtgatgggcataatggaagaggccgctaaggacaatttataagattatggtcacattgaggactatgacaaggtacatgatcatttattatacttttgtttcttggcagtagtggccatctgggtttggggcatggcaggtacattataggattcagggtgaggttttgtgatgaattggatatggaggagattatttgtaagtgatacatgtgattgaagttcccaaactttaatgtgtatgtgggaatcagacctacaaattttgattctgtaggtctagtatgggatcaaaaattctgcatgtttaatgtaaactctcaggtgatgctgatgctggctgttcatggaccacattttgaatagcaatggtctagactgcatatgggaattatattatgtcagtttccatgctgctgataaagatatactggacaagatatactgggcaagactgggcaatttacaaaagaaagaggtttacagttccacatggctggggaggcctcacagtcatggcggaaggcaaggaggagcacgtcacatcttacatggatggcagcgggcaaagcaagagcttgtggagggaaactcccccttaagaaaccatcagctctcatgaggcttattcactatcaagaataaggatgggaaagacctgctcccatgattcagttgcgtcccaacgggtaccctcccatgacatgtgggaattgtgggagctacaactcaagatgagatttgggtagggacacagccaaaccatatcaggaatgaagccaaaagtcttcataggtgaggagaatatgagcattggagatcctgttaggttaaagagtacagaataggtgagatgagagttgaataaatagaagacttgtggactaagactaaaaataagatttatgtcccttcagctcaggagtttgagaccagcccaggcaacatgctgaaaccccatctctacaaaaaattaatttagcaggtcatggtggtgtgcacctgtagtcccagctattccagaggctgaggcgggaggatcacttgagcccaggaggcagaggttgcattgagctgagatcatgccactgcactccagcctgggtgacggagtgagaccctgtctcaaaaaaaattttatgaagttgaacaattctgagtgatgacaagcccagactctagtcctgggtgtggttgactaaaatggaatggcatttaaagtcctgtgagaatcatagatggacggagaagtactaagttcttcagtgaatatggaggcacagattgggaagctgagtataggagacagtactactgaagggccgtgatgcctgttacggacttttacatgagaacataaatagttgtctgaaaagtggctcctggcccagagaatgcctgttcctgttgccagccctatggcatatagagtcctgaaagaataagcagcgtgcactctctcgtggggaaagtgaacacttgagaggttgaatgtgcttctcaccaactcccttggggacatttaaagatgtaaggggtaatttttggcacaacctaaaatactgttctcttcctgttcagggcttacctttttttaaacagggtattcagagttgttaatagctagggttgttaagaattatcctcaggctcctaaagaaactggcaagttgaattcagttatttggtatctgagccaggtaactgcatcaagtggcctgtggcttacagcttttctaccaggggaacaatggtgaatttataataaaaacagaagtgtctcaggctgagaagaggtatggagaaaagagtagactcatgaatgatttctgcactctcaaagtaatggttaaagaccctttgcatagtgtaaacttgtcttgcccatgacatctgtgtaaatggaactagaactaacttttggattctactcatttttaaagaatgttgcagaagaaaatacaagggtactctattccttatatggagttgttgaacacagtggtactatgaggtcggggcattacactgcctatgccaaggcaagaaccgcaaatagtcatctctctaatcttgttcttcacggtgatattccacaaggtaagatgtcttggaaaattcaggcactcagcagattacggcaaaaccaaaaagtaatcaacttgaatctttccatttatgtttgatttttcattttctcatgacagattttgaaatggaatcaaaagggcagtggtttcacatcagcgacacacatgtgcaagctgtgcctacaactaaagtactaaactcacaagcgtacctcctattttatgagagaatactgtaataatatcaaaagcactttttctggaaacacatttatggcttttataatggctgaaataacgataaaaaaagactaattaaaatcatgttcacttaacattaaatacatgccagaagaaatcatgtttatttaaatattgaagggaaaaatacctaaaaatgtacaaaggttttatattgtcatagtggtttttattcctgctttgtttctggaaaggaaatcctgaattacttaagtactttgtgtttaatatatctgggtgatggatcacaacacatcaataaactgacttaccctaaaatcttgttttattactgggaagattttaacttctattgacttatcctactaggtaacactttaaaaaatatttcatcagactggctaatgaagcttcattacaagtgtgttaattttttttttttttttttttttttttttttgagacggagtcttgctctgtcgcccaggctggagtgcagtggtgcgatctcagcttactgcaagctctgcctcctaggttcacgccattctcctgtctcagcctcccgagcagctgggactacaggcgcccgccaccacgcccagctaattatttgtatttttagtagagacagggtttcaccgtgttagccaggatggtctcgatctcctgacctcgtgatccacctgccttggcctcccaaagtgctgggattacaggcttgagccaccgcgctgggccatacaagtgtgttaattttataagcatctatattgacagcagaatataaatgggagcaatgtttctttataagccttctgatgccatagtgtgcataagctggggtatacaaggccttactctgtatttgctctgtgccagtggtcaactgattttggacagatgtaagacaaaccagtctcactcctatgagtataattgggtaccaaaccccttaataccagcataccagagaaagcctgtgaactgtcccaagtcagccactgtttgagttacatgcaacacaaagagcttagggacaccaagcgtctctgaacttcttgaaaggttctctgaggacaacttcgacatacgatgaacatttctaacttgctgtggcagtaatgagagttgtatcattcctaacaaacacctgttgagtttatgtaatacccagtcagtcatactgcttctaaaatctcttggaaagaatactaaaaacaggctggtgcggtggcttatgcttgtaatcccaggactctgggaggtcaaggcagtaggaaacgttgagcccaggagtttgagaccagcctgggtaacatagtgagaccctatctctacaaaaaacttaaaaattagccaaatgtggtagtgtttgcctgtgtccccagcttttcaggaggcggaggtgggtggattgcctgagcccaacagcagaggttgcagtgagctgagattttaccactgcctgtgcgacagagcaacaccctgtctcaagaaatacatacacacacaatttcaaacagtattaaggaccttacataaccaacacatatagtagcacatgtcctataaaattcagtatgattatttataataatttatttataatgttcttggctttttcaacactccttactgattttaacaaaatagaatctgctttatgaaaactgacttaattttgtatgtcagtttatctattttctaagcattttttttgtactttgctaagtcgagtgtcttcaacaaattattaattgctattgaaacaagtcaccttgagtcaggaattccagagctgtgacaaaaacactggaaatctagtccaggtgttggcagcactttcctgtagagggccagatagtaaatattttaggctttgtaggcccatttggtctctgtcaaaaataaagatacttaactctgccactcccttgttagaaagcaactgcagacaatatgtaatggtatgagcatggctgtgttccaataacttatttacacaaacaggcagtaggccagatatacatgggtaataggcctctacttacataagtgacttgccttaagtcccacagctaatgtgattaacaaggttgagaggaacacaagtcatttagagccaataaccgtggtcattagacaataaggctttgacagtaacaatatgtttattataacatccagccaagaatacaaacacaaaataactcttaatttaaggagaataagaaaacatcaggtgattcttgagtactactacaaatacagccttcacctacagtaaaaattaagccaatttcaatcattttggtcatcatcccagtctttcttcccacttggaggcttgggcccaccagctggttttgccatgatgatctgcataaaaaagaatcacacaagagtatgcttatcaacttaacctttagaatgaaaagaatgcttctattagcatgatttaagattaagcagtcttcttggtataattatgtactgcatataaaacactacagcacagagtttgctagctcccttgttagaaattcaattgtaaactttcagcgcatgagaaagtttactgcttttatggataaccgcaataaaatccacagagattagtgaacattccaagacatgcacttcaataactcaaaaagctgaaagtgaaaatatgtgcatgcatcactggtgtaagtcggtcagtttggcacctgatttgctatttatatatgagatgtgtcttgccaaccatctctgtcccaatttccttgtggtttaggagctttaggcccacctgccagctttgccattataatctaaagtagttgatacataagtatatacaaagtttaacactgaaattttctaaaacctgtaaatgagaatcattcaagcagccaggaattttcataaacaaaaatctaagttcccaacttaaaaaaaaaagcgccacaaacctcaccttactttatctaaaataaataggttttagctttttttttttttttctttttgagacggagtcttgctctgttgcccaggctagagagtgcagtggcgcgatcttggctcaatgcaacctctgcctcctgggttcaagcaattctcctgcctcagcctcctgagtaactgggattacaggtgcccatcaccatgcccggctaagtttttacttttagtagagacggggtttcaccacgttggccaggctggtctcaaactcctgcatgatccacccgcctcagcctcccaaagtgttgggattataggtgtgagccactgcgctcggctggaaaacatcttaattaccatctgcaaacctgaactgggcagtggctcatgcctgtaatcctagcactttgggaggccaaggtttgaggccaggagtttgagaccagcctgggcaacaaagtgagacctagtctacaaaaactaaaaatatatatatatataaaatatatatataacatttgataatatatatatgatatatgtatcatatatacgatacatatatcatacatatatcatatataatatatatcatacatatatgtatgatatatatatcatgtatatgtatgatatgagatatatatgatatatatgagatatgtatgatatatacatatgtatgatatatacatatgatatgtgtgatatatacatatcagatatatatgatatatatctcagccaaccatgacagcacctgcctacagtcccagctattcgggatgttaaggcagaagaatcactggaactcaggattttgaggctgtggtgagctgattatgattgtgccactgtcctccagcctgggtgatagagtaagaccttatcacaacaacaacaaaaaagatacctaaacctgaaattctcagaataacatgttaccaattgagagtaatttcagactgaattaaaggcattaagcataattttagaacctaagtgcacattgattttaaaaagtaactaaaagctgggtgtggtggctcatgcctgtaatcccagcactttgggaggccaaggcggacagatcacgaggtcaagagatcgagaccatcctggccaacatggtgaaaccccgtctctactaaaaatacaaaaaaaaattaggtgggcatggtggcatgcgcctgtagtcccagctactcgggaggctgatgcagcagaattgcttgaacctgggaggtggcggttgcagtaagctgagatcacaccactgcactccagcctggtgacagagcaagactccatctcaaagaaaaaaaagaaacaaacactaaaacaagtagttcccaaactttagtgggcaccataatcaaaagtgctcattaaaacagactgctaggcctcttccagcatttctgatattggtgggtctggagtgacatctgagaatctgtatttcttcttttttttttttttttgagatggagtcttgctctgtcgcccaggctggagtacagtggtgccatctctactcactgcaggctccacctcccaggttcatgccatgctcctgcctcagcctcccgagtagctgggactacaggcatctgccaccacgcccagctaattttttgttttttttagtagagacgggatttcaccatgttagccaggatggtctcaacctcctgacctcgtgatcctcctgccttggcctcccaaagtgctgggattacaggcgtgagccaccgcgcctggcctccaagaatctgtatttcttatttatttttagttttttaaaagatggagtgtcactctgtcaaccaggctggagtgccatgatgtgatcacagctcactgcagccttcaactcctgggctcaagtgatcctcccacctcagcctcctgcgtagctgggactacaggtgtgagccaccatacctggctgagaactgtcattctaacaagttctcaggtgatgttgatactattttgggaccatactttgagaactagtgaaatagacattccaacaaagattaatccagtccgtactacactatccaatgcttaaagcttgatgtgcaattccttttctagaatatatactatacaaatttaggttcattatactatacactatatacacaaactggttaatacagttggatgggttctttagatacatacttcacatagagtgcaaagactgggggaacagatcaaccaacaacttcccctaccataagataaagcagacttcctagtttaaagccaaaattcaaactgcctttgtgaccaagggtggtggttattgtcttgcttgaataattgacattcaaagttcctaacacagttggaatttctgcgttccttatgctgcagtctacttagcttcttccgtccctgctatttttggtttccccttttattcttagccacattctaatttctagaataagtattttcttaggtttctatttaagaactcaaacatattcttccattgaaaatcacctaataagctgacagagaaacccgttaatctggtacataaacatctagtttctgcttattttcaatgacttgaaactaaatatccagttccatttttggtcatctcttgctatcatagttcttccaataaatttgttataattaccaccaactggtccttactgtacttaaaagctgaaatgtctttccactgatttctacttaggacttactccacctttaatatgacatatgacttttacctaatggatgtatactgtccctctagcaaattaaaattttctattaagtacttataaatagtcattgcttattaattacttctagaattttgtggggaaatgtatttaattaagtttgccagaaaataccttttggaaaaataattatgatttcaggtttacttctatatatagaacagtctaccacaattcttcaaaaaaaaaaaaaaaagggtagaaatatgattttaaacacctttaacatcttttagtatctcaagctgtaatttgtcatagcagaaaaaattttcaatgcccagtcctcttatctgcagacagctagagactccattttccttcaagctggtggtctgcaatgtctgcttgagagctttatggtccttccaaattccatgttagtattatatattaaatttactctctaaattatttgtacaaatgggttctaaggctaaaaggtttgaaagttatatattcaatacaatttataatagaagaaaaaaattggaggggggcacatagtatctctaataggtgaggactaagaatcctttgaattagaactatgctatgttctagttctgggaaaatatactattaaacagtatgcaaatgagtatttttaaagatcaaaatttcactttgctcacctgatccactctaagtacagtgactgcagcattagtagcgagtttgatagcccaatattttcccaggtaagtatctagaataccagcttccagcatgtcctttacagcagggacttcagcctgtcaaacacaattttcatcctttcatttaaaatccttttatgtgaaaatgtttacacccacaaaaagcctcacatagctccttaaatagtactggaaagtaaccaagcacagtcctaccttatagagtcatcctttagtatgtgaggattggttctagcacctccaaggatgccaaaatctgtggatgctcaaatcccttacataaaatggcatggtgtttggatataatctatgcacatcctctcatatactttaaatcgtctccagattaattatataacatagtgtaaatagttgttatagtgtatttttaaatgtctttagtttttccaaatattttcaatctgtggttggttgaatcaatggatacagaactgggctgactacacactacagaacaaaagactatcaataaaacagaaggaaaatgaaacgttcctccatcagacaacctatgtaaaaactaagaaaataatctgctcccaaatcagaacactgtttctcattgatatttcttttaaactcatactatttttaggttgtgcattccccaaataaagcaatttaagttcagtgttttttcaaatacctcaatatctaatccaacgtttttatttccttcttgatgtactgcataaagtttagagattacttcattggccttaactccagagttttctgccagtgcgcggggaatagcttcaaatgcctcagcaaacttcttaatagcatactgttcaagtccaggacatgtctaaaacaaaaatgcgttaattactgtcttttattcaagcaatggaaagaaagtcaatttatacagaaaaagctgtacctctccatatgatgtgatctgtttggctaattcaatttctgttgctccacctccgggtacaagacgtttatcctgtatgtagcgcccccaccaaaaaaaaaatgaacacaaaacaaattcactaaaaatcagtttgcagttttctaatcttttcacattccagtaccccaccaaacaggagtttttatcagtcattgttactcaaatacatattacaaatttggtaaaaatgagtgggtggggcaaattttcttagtgcacagtgtctggtgtatgaaaaggaccaaagtgaagaatgggaatagtaccgtatcatttttgcatatccacagatatagcactaagaactgctttagcaactaacagtacattacaatggaaaacaacgataaacaattttttttaaagctctgttttgctgttaactcctctgtacaatcttttttggaaactatcatattcactaacaatggacacttaagtcttaggtaaaaacaaaaacaggtgcttcatttcatataaaccactcattctgaagttctcatgatgtgcaagagtctgcaaactgtacttttaagaccatacaaattactcagaccttacaaactactaagaatattgctgatactgacccttgtaagaactttgaaagtattaacaccatcgtctactgccctttctatgtcatccatcagattgtctgtagagcctcgaagtactatggtagaaatggcgccatcttccttttctatcaaaaaattaaatatatttggtgattaaatacaagaagctaaagccctacacttaaacatgttttaccattcctacataccatgcttaaaaaccaccacctgagtatctccaacttctgagaggtaaacactgtcacagtgtcccatttcttcaaggacaggaggtgtctgtaagaaagtgactgttgtaataaaaattccatcttgttcaactatcttttagtgttttccaaaatacataccaatctaggaagagctgtagcaccaacagttttacaaagtcttcggagatcccattttgagtttagcctttaaaaaacacaaagaccttaataaaagttttaatcaatttcagatagcatataaagttcaaattaaagaggaacctgtataccagcccccatgtcacattcctttgacaatggattttaactcagaacatgtctggattgcaatgaacactaaggccaggaagctgattcctgactctctgagtgagtccagctggccaatagtaccacatcttaagcctgtgttgtatggcattgttctagaattgggagaatggaagtcactttaggatgtcagtggtttatagttctaaaacaccagagaaacccttacaaaactcaacagcatatagaaaatttttgctttactttgtgcaatcaatgttctgtgaacaagagtgatttattttgcacattttattaggtactagggatggtggtaggtagaaatgggttaagttgtctagtgtgcaccataaatgtgttcatggattaaaagggatcttcctgactccatactctgataggcaatgcaccaagcttgtgtctagtctcttggacaagttgttccttttgcctggaatgcttttccctcttcaattatctggtaattggttcttcaagctctcagcttaaatttatgttttctcagaggtgtttcctgacccctccccaaactaaatccttctgctatttgacctagtacctttactttccctttattaacagtcttcatggtctatttcgtttagtgttttcaccaccaaaaaaccatttatgatataggtaaaaaaaaaaatcggctttttcttacctcactaacatgatattatatttatttgcataatgaagagccatgtctgccactttgccacctgttactacgacatttgcaccagtatcagcaatagctttgacttgtgcatccatgaggttttcttctcccttactaaaattcatcaattcttcagcagtctttatcaacactgttccctggcaaaacaagtaaacattccctttaaaatcatttcactacgttggtgttcaaagtcattagataatagttgactgaagaaataaaggtttggcaaaaaaatatgaagatatatgtgcatatattatgaagcagcagaatactgtatgtgtgaaatagaaactcagcttgcttctagaaccccctgtcaaaacagatgcatctgcttttgataagtacttaggtggaaaagtacttttatctatttatttattttgagacagagtctcactctgtcaccatgctggagtgcaggcaggatctcggctcaccgcaacctctgactccctggttcaagcgattctcctgcctcagcctcccaagtagctgggattacaggcaagcgccaccacgcccagctaatttttgcatttttagtagagacggggtttcaccatgttggccaggctggtcttgaactcctgacctcgtgatttgcctgccttggcctatgctgggattacaggcgtgagataccgtgcccggccgagaagtgcttttattttaaatatgtcaggtaggtaggtgtcctggtgtttgtcttttgacaaaggctaactagtgttcccaatacaacattgtggttctcaaactttttctaaaatgtggactaggccgggcgcggtggctcatgcctgtaatcctagcactctgggaggccaaggcgggtggatcacttgcagtcaggagttggagaccagtctggccaacatggtgaaactttgtctctattaaaaatacaaaaattagccagagatcacttgaacccaggaggcggaggttgcagggagccaagattgtaccactggactcaagcctgggtgacaaagcaagactctaaaaaaaaaaaaaaaaaaaaaaaaaaagaataaaatacaataaaataaaatatggaccaaatgaccagacccccctcatgctacaaaattttaaaactatcaacaacttggatttcaagaattctagagatgaagtcagccactattgactataaacacaaacttcaaactttctaacatgtatttttagaaacatacttaccattttcaaattacattagcttatcttgttttaggatgctacagaatgtcaactttattttcgtgaagagcacacaaaatactcacattctcatattctttcacttgctgaatgtataagctctactagaagggctgtgtgtcagattataaataatacggccaccatctttatatttccagtttaatgttcagtagttgaattagatatttgaagactataaatctggcataaaaaaataggtaagatcctgcaatgttcagttttttaagaagtacttactggtttaagagctaactcaaacaatctgaaagtgcaaccccaattattacttttaaggtttgaagtctacataccttagtttctgttatcatgccatcaaaaggacaagagtacactgctatttttgcatctttgacagatgttacatcaccttcggtttccttcttaaaaaccatgccatgcaatactgaagaggaactgataccagagccctaaggaattgaataccaaactcatcagcaatctcctgaaaataacattacggtcaaactgttgattctccatataccaaaaatatccctttctaaaataaagtcataaaccaaggcagtgactcctgggataaggggtggagtggtggacatacagcacacccttctgctcgaggcagaaatcactgagggaatgagctacttttagggaggggaggtccttccatgtactgggaagaaccaaaggcagagaactggtcttagccattcagttacctagtacttggtgccaatataccagccacagctgtcagtactgcaaatacaacacagaacaaagcaaagattctgttctcacaaggttgcatttaatgggaaaagctggcagtacgtggagggagacagcaaacatagaacacgtgagtatcttcagggaaagcacatgtacttatgttatgctaaattcacattaacaatcagaatgccaatgtgcaaaaccaaaaccattccactgataggttttactctatcaagcacattttatcaaaaatatactttaatatttcaatactaacattaaagtgtgaattctattattgaagaggaataggacgatttccaccccactcaaaactgtcttataagcttattataattcagagtattatgaagaacacaaaaaaattagtattttgcgctgggcgcggtggctcacacctgtaatctcagcactttgggaggccaaggtgggcagatcatgaggtcaggagttcgagaccagcctggccaacatggtgaaaccctgcctctactaaaaaaatacaaaaattagctggacatggtggcatgcacctgtaatccagctacttgggaggttgaggcaggaaaaccacttgaacctgggaggtggaggttgcagtgagccgaggtcgaggcactgcactccaacctgggcaacagagccagactccatctcaaaaaaaaaaaaaaaaaaaatttagtattttgtttatacattattcttaaacccacaagacatcacagaaaatgactttataaggagataatatgtcaatatccttttaaacttaaataggtagtagtattattacaacttagcaacatcaaaatgttacaaaataatgcctcaaaggccaggcacggtggttcacgcctgttaatcccagcactttgggaggccaaggcaggtggatcacctgaggtcgggagttcgagaccagcctgaccaacacggagaaaccccatctctactaaaaatacaaaattagccgggtgtggtggcgcatgcctgtaatcccagctactcgggaggctgggactggagaatcacttgaaccgggaggcggaggttgcggtgagccgaggtcatgtcattgcactccaacctgggcaacaagagcgagactccgtctcaaaaataaataagtacataaataaaaataatgcctcaaaaaaagtcctaagtgttcaaatcatgaagtaacatttaggtttagatgaacacatttttttttttttgcacaaaaaaacaaaaaaagcacacaaaaaaactgacctagatatgtagcattaatgcattttctacttaccagaattttacaaactctgatgttatcaacattgaaatggccggaatcaggaaaaatagatactgttaagaaaatgagacatatcaaaagattattttgggacaacagagaaagtatctagtcatgttaaaggtatttttattttggatcttttcatttactgatatttacttaccgcatgcctgagcaataagcttggccagaaatacttcattaccatattgtttactcattatggaggtacgaagtagagatgagacttcatcaatatctcgaaggttttttgcagaacaacataccaaattaggaagaatctcatgagcttttctgcaggctatttcataaccttctatgacctaaaacataaacaacatttcctattctgacatgacttaaagtagcttattttggtaacccaatgcatatggatgtttatttttgatacaaaatgacaaagaatatacttcggaataaaacatatagtagactctactagttatgaatggaggcttagatgacagcccaaatttgaatcttaactctacctaactcactagctatgagatcttgggcaagatttttctaattttagtctcttttctcatctaaaataaagtgggaaaaaaaatagataaaatgggattataaggcctcactaatagggtttttgtgagactaaaatgatacagcatgtgaagcatatgtactataatggctggtacagagcaaactgctcagtgcatgttagctactactataataatgattttagtttatgttttaagcaggtgtatatgtaagcaaaaatttagtaggagtaaattataaatgaacacttgcctctgaaactgacaggccaatcctcagaagttcttcagctaattccaggagagctccagcaaataccagaacaaagtttgtgccatctccaacttcttgctcttgcatatgagaagccattacaatcatttttgcagcaggatgctgtacctagtagaaaaggtaatatcaagttaaacatctgatccttaaagcaacataaaattgttcatttccatttcttaaatagactcaattttcttgtagattaggtaactccatctgatcacactgctacactgctatacgctacttatagtgtggtcacaagaaaaaatccaagtccctttatgccgatcagcacaaatgtatcactataaataagaatttcaaagtgcatcctcttttggtggcctgcacatacagtgccacacatatgtttcaccatatcatatttcactaaattaaaaaacaaagtaattacaaccaccaaacctagatattttttaaaagccttcaggagaactaaaatagataccacttaacttggtcatgactctcaatatctattttactatatattcttgttgtaagggttatcatttgtgatttaaagaaaagggggagtataaaacttttcttcaaatataacataattttatgtggattttattcttaggatttaattttagatacctttacagaaacaagccaaggagtaagaactgagagcaacaagaaaactataaaaagtcagccctgtgattttattattttgacggtatcaccactgtactttaataactcctgagatcatcagtgtgcaacattaacattcacagtgacaaacccttgtacaagtgttttgtggagttaaaatttaacttttaacttaagttctttaagaatttatatatataatatgtatttttttttcttttttgagatggagtcttgctctgtcgcccaggctggagtgcagtggcgcgatcttggctcattgcaacctccgcctcccaggttcaagcaattctcctgccctagcctactgagtagctggaactacaggtgtgtgccaccacgcccggctgattttgtttctgtatttttagtagagatggggtttcaccatgttggccaggctagtctcaaactcctgaccttaggtgatccgcctgccttgacctcccaaagtggtgggattacaggcgtgagccaccgcgtccaaccaaaaatatattatttaagaggttagaaaaatgttgattcttctatcgtttcatttaaaacaaaagattaagttctagtgctttcaagggctaagcttcaggaaaattccctgaggttgaatatgttatcctttaattacaaggcgggaatgaggaatggctctctctgcctgttcaggtgccagaccttccttataaccctgctggcaggcagtatctattttatagattctaatagtaaaactaaagctgaacaaagtaaaatgccatcaactgattgtttttattttcacaaaaccaaatggttggatctttttaaaaaccactgttatatgtatacgtttttgcactgtggaataattcacttcagagtcaccctatagaatgaagacaatggtaatcaatttcatatcgtaattagcaatgtatcacaaccaatccctccataaattaataacttgagagatttttaagatttcagtggctaaaacattcaatctaaagaggactctttataattagaacaatctgtacaataaattttcaagctggaaaaatagtcccttatccaatctgaaataagagatttcttctagttaaaatctacttaattttgatgtcaccaaaatatttcttgactttttaaagaaacaacttacttctagttctcttaaaatagttgctgcatcgtttgtcacaaacaacttctccaagtggttgataaccattttgttcattcctcaaaagtaacagttaaaaaaagaaaaagaaagccattattaatcaaatccttccccaaatacccaggaaaatctagttaagaaattataaatttgtatattaaaaaaagagctttgcaagaaaacacatactatctattcttcaagtttatcttatagccccatgggcattctctgactgcagacccatattctttcttccctttctaatgtcctacaatatttactacgtaagatgccaaatctcacatttttgccaatttctatcttctgtttgcaacatgactgtcatgcagcaagtgctcaacagaaattaacatgtaaaaaggccaaaataatctacttagtatatttagttgtatgtttattccatgaaactgtatcatttaaatttaattggtggtagaaggcaagaggaaggagagaattttcttccttaaactatgtcacttttatatttagtgtttgtcagaatgaacattaggtactatcttactagtcaaagtgttataatttttctatcctctcaacaggataaaaagtaatatattgacccccatttttctaaagagatgtgagttgattgaaaattagaaataactaaaaattggaaatgaactatcattgagctatcaaattaacttccgaagtcataccataacatcctcagaacaagtctgaaagaagacgtagtacacaatattctactactgtatctttacaaatattaatttagaaattaccatttggtccatatgctgtacgagtggtttgggcaagctccttgcaagcttgtatgtttctatacacagcctcttctaatcctgaaaagtgctgttaaaaaaaacaaacaaaaaaccccgctaattagacaggacagtgaaacaaaaatttcaaatacaagatatctttgcttatatcttgcctctaataaagagggagcatagcttaggtatttggcacaagagggctggttgcaaatcttagctttctggctctttttaaatttgggcaattttcttaacatttcttcattataaaatgaagtaattataatagtacctaactcataggattgttgagacaatcaaacaagattttttaatgtaaaacacagcatttgatattcataaatgatgcatacatttcctctctagttgaatgaataaagtataacattttgggggaccgcaggtacctacttacacatcaaaagacttaaaattttttttattaaaagtagtgaaaagtacagggaaccatgctaagactaattagagaaagggtatgaggtacttcaagtagaatacctttccagaatttatcagtattttctaactaactgttgaaatgtggaatattcttattgtgttagaatctgggcttttgtaaagccagaagttctttaagtatgtgccactgaagtgtttagagactgaatactttttttgaattgcaacattatcccaatgtatatgtattgaaaagcgaactgctcacggtactaaaaattctcacaaattctacactggacttttttagagttgaggtttacttgggtcctcagatatatttcactaatctactgtgcatgagaacatttctttagagaagcgctgcccaatacagtagccactagctacatacatggggctagtgaaagcaatcaaaataaactttcaagtaattaaaattaaaaaattcagttcctcaattgcaggagccacagttcaaatgcccagtagctacatgtgggtagtgaatatcacactggacagcgctgatacagcgtatgtccagcactgcaaaaagttctatttacatagtactgctttacaatacaagccatgattttgtgatccaaaaccaaggttaatagccattactcttttttgagagagagagagtctcctctatcgctcaggctggagtgcagtgagctgagatcgtggcacgatctcagctcactgcaacctgggcctcccgggttcaagcaattctggaggctcagcctcctgagtagctgggattagaggtgcgcgccacaccaggttggttttttttgtatttttttgagaggcggagtttcaccatgttggccaggaactcctggcctcaagtgatccactgacctcggcctccccagtgttgggattacaggtgtgagccaccaacccctgccaatagccactgctttaaaagcatcttcagcaataagaactgttattccagcaataacacttaagtctgaactcctggcttacactcttgcttcttcccctcactccccattctgtgagaaactaccatttgatcagatcccctcattcccatacttaagacccttcaatggtttcccaaccagcttaggataaaatgcaaatcccttttcaaggaaacaaggccctacgtatcccggcccttgtatggctcctcctctgaacttaccattcttcctttctttggtaagcttcagccctacaacctgttgttgttgttgttgttttaaaaaaaaaacaggtcaaaatcattccttcctcagggtctttgtactagttagtccctgagcctggcatttccccctaagtaagaggtcgggggaaacagcccaggctcaggggcttctctcactaagcactgagctaagagttcttccctaaacgtctaagtgttctgtctattcctgatccttcttttacagacatttttacctcctgtcatcctctactatagtgcagtttctttcatcattatttggaattctccttttatttaatcattatttctgccttagaaggacataaactctacgacaaatgggacttttgtctttcactgcagttccttcagtacctatttattgaaagaaatagctcagtgttctgtaaaaaactactagcactggaatgacaaataatgttttgtgatacacgagttttccaaaactgtattagtgaaaaaaacccaaattggaagctattatctcagcctgattttttcaagggaatcagcccatatcattttcaaaagattattccaccaacatttaccttgaaccctgacatttacttactataccgacattatttgaaaagtgcatcctacaaacatgaacctagttctattaaactgttaatgctccccgtacctcgcataaaaccttaaattcaaccacactgatctatttcttgaattaacaaaatctggaggacacacagaggaatgcaatttgaatagcacaagagacaaatttatcaatagtgcagtaagatattttttaaaactatgctaccgaactaacgttcaagaaaaggccattaaacaaaagtgttatctgcacccctctatcacttatcctgcagattacacagaactcaaagacaccacctcttggtccaatctccataatttaaagacgaaggaaacaaaacccaagaaagttacattttagattaagccagctaacataagttgggaccggaactcatttggctacaacgcatggcttctgtcaactaagctgaaagccgtatgtttctcactgggaagcaagcaaccaagacccggccctttttcccactctcttctctggatcggctagttctcgttcttccccatcctacaactcgcgagctatgtgataatcgacgtcgcagttctcaagacaatttcatctacgttattcaatttcaccctcacaacctcctttaagggtgacgggccttagccccatttacggatggaggcaaaacgcacgcgcggcttcacatccgtccaccttcaaggtgtacaatgtcgatcgtgccgccgatccctcggccttctcccggtcgcggaagaagagaagtgcccgcaggctccggtggccgagcccttccaaaatcacctccctttctggaatcttctcttcccccggccgctgagccagggcagcacgctcagcccgttagtaggccctcctacttcgccgcggccgccgcagccctatgctgacgctcccacctcattcctttccttcagcccttactttcgctccctccttgagcatctgggcaaagcccggagccttgggaacgtgaagcgccatggccagcctgcaggaagcagttcacgcgaccgctcggaagaccgcggaggaagcgaggagcacgcacagccttctgggaaagcagcgtggggccgcctcacgctcttcctggctctccaattagcccaccctttccctgccgccaggtctgaagcatcgcgagaagagcaacctctgtggccagaaccaagctgacgatccccgatcgggtcgatcgatagggcgggcccagggagcccctcgggtttctggctcacgcacgcgcagacagcccaggccgtgagaggttgctccagtctgtgctctctgaccgtagtcagtagtcacggcgttagatttttgcggtttttgatctggaagccacacatccttagcttaatttccacgtatcttccagacccagccaccaacgtcagggcaggtgtgctttttttttcccgaggcagagcatctgccccatcccccaaaattgtctctaggcgtccgctctgtgttgggcaccataggaagcgctgggaatgcgcacgataattaaagtcgtcactaagagtaatgtagtacacatcaagtgctcaagtgtgccatattctgtgtgatctgctttacatgcagtatctctgttaatggtcagtcttaaaaattaatgaattgtcggttaaaataccatttagttttccttccataaaatggagacgataccattaaaaattaaaaattaaatggtactgtctctattttgtagaagggaaactgaagttcacaaactgtaaataattttcccaagatcacagagctagtaaatattaaagctagaattcctatctagatcagacttattgcaaaatgccggttcttaaccactatctatattcctcttttctacttcttcctgggaatataaatcccttttactcttttaagatcagatataaatacatatttatttatctgatttatatatataatatacacattttatataaatatatctgatttatatatgaatttatagataaatataaatccctttggcttggtggcatgcacctgtagtctcagctgcttgggaggctaaggttggaggatctgcttgagcctgggaggttgaggcagcagtgagctgagatcatgccactgcactccagcctgggcaagagtgaggccctgtctcaaaaaaaaaaaaaaattgcaaaaatgtaaatgccactgatatggtttggatttttgcaaaaatgtaaatgccactgatatgtttgaattgcctgcccaaatatgatgtggaattataatccccagctgttcttgtgatagtgagtgacttctcataagacctggttgtttaaaagtgtgtggcacctccccactctgtctcttcctcctcctccagccttgtaggatgtgtctgcttccccttcaccttccaccttgattgtcagcttcctgaggcttccccagccatgcttcctgtaccgcctgtggaactgtgagccaattaaacctcttttctttataaattacccagtctcaggtagttctttatagcgattcgagaacggactaatacagccacccttttcattcttggaaaatagagatattttaaataaaaacatacatattatcatgtgataggattattattttttaaataacgttaaaaatttatcagttttaatttctaatatagcaaatattcatacctataacccacataaacaaaagacctttggggaagttaatttttaagagtctaaaggtgttctgagactgatacgttagagaactactgtaatgatcagtcccgaacaacagaacaatccaagatttttcctggattagctaagaaataaacaaaagcacattcctctgactcagagataatattacttataaaaatagctaacacaaaataaaattgaaataaaactgaaaggagctaaaatgacacctgattaacatattaatatatattaatctatatttaaagtgactttgaggcctaggttctggtccttgtctcactggtatcttctccatttggcattaatgtcttgtattctggccccagtacctggaatagttcgtgctgtctgctttaccacttctgcctcagggtctttgcctctgctgttcttcctacctaaaatgctcttctattcccttatggctgaattaattctacctcagtatgcagacactttcattagaaagtctttgatgactcccaagacattccctgtttgtcattctcatagcttctgtgtttctccttcatagcacttaccacagttgtaatgacagaattatttgtcatctttctccaccagcaggtaggtggtgaatcaccagcacttatactgtaattggacaatgcacggagtaaggagtcaataaatcatcatcaaatgaactactgggtgaccaaatggatatccagaagaggagatcgaagaattaaggtgctgtggtctcaatgtttgtgtccctccaaaattcatgttaaaatcttaggccctgaagtgatggtattacgtagggccttttgggagatgattagttcattaggtctccacccttataaaagattagcgctcttatgaaagaggcccaggggagcttatttgcctttccaccatgtgctgacacagctagaaggtactatctatgaaccaggaagcaggccctcaccagacactgtatctgctagcaccttgatctcggacttccagcctcacgaactgtgagtaacacatttctaccgtttctaagccacccagtttgtagtattttgttatagtgtgtctggaattggtgggttcttggtctgactgacttcaagaatgaagccgtggaccctcgtggtgagtgttacagttcttaaaggcggcgtgtccggagtgtgttccttctgatattcggatgtgttcggagtttcttccttctggcaggctcgtggtctcgctggctcaggagtgaagctgcgaaccttcgcagtgagtgttacagctcttaaggcacgtctggagttgtttgttcctcccagtgggtttgtggtctcgctggcttcaggagtgaagctgcagacctttgcagtgagtgttacagctcataaaggcagtgaggacccaaagagtgagcagcagcaggatttattgcaaagaaaaaaaaagctcccacagtgtggaaggggacccaatcgggttgccactgctggctctggcagcctgctttcattctcttatctggccccgcccacatcctgctgattggtagagcccagtggtctgttttgacagggcgctgattggtgtgtttacaatccctgagctagacacacaggttctccatgtctccaccagagtagctagatacggagtgtcgattggtgcattcacaaaccctgagctagacacagggtgctgattgatgtgtttacaaaccttgagctagatacagagtgccgattggtgtatttacaatcccttagctagacgtaaaggttctccacgtccgcaccagactcaggagcccagctggcttcacccagtggatcacgcactagggctacaggtggagctgcttgccagtccgccgccgtgagcccacactcctcagcccttgggtggttgatgggactgggcgctgtggagcagcgggcggcgctcgtcgcggaggctcgggcatggcgggctgcaggtccctagccctgccctgcaggaagacagctaaggccaggcgagaaattgagcacggcagctgctggcccaggtgctaagcccctcaactgcccggggccggtggggccggcaggcggctccgagttgcgaggtccgcggggcccacgcccacccggaactcacgctggcccgcaagcaccgcgcgcagccccggttcctgcccgcacctctccctccacacctccccgcaagctgagggagccggctccggcctcggccagcccaggaaggcgctcccacagcgcagtggtgggctgaagggctcctcaagtgccgccaaagtgggagcccaggcagaggaggcgccgagagcgagggagggctgtgaggactgccagcacgctgtcacctctcaatagcagcccaaacagattaagacatgggaggtatggtctctattcttaccatccagacgtatgtgaagtaaaaccagagaacaacacaaagcaatcaagagggtttttgcgcagagtttgcaaaacgccaaggagactgtaggtttctgttatagtgattcaaaagcctgggatcctcatgttaggtgctgcctgaaaacatggcctccagcctccaggagagctaaaagccgtgaggattgggggttggggatgtctgagccatcttaggattctgataaggactcagttcactatttgtttctagttactttgtttctgtttttttcattttttgtttgtgttaaagttttaacccctgtacgtcagaattgtttaatgtttttggcttgtctatgtgttttgattttttttgtattattatttaattttcccaattcccattaaatccttaacctcctgacttttctttttctgcctccatttgtattgtttatttcatgttactatatcatcttatgtttcagtatttttctgttgaattttaattcttttgtttggctttggagtctgactcattttgtgttggctcattattttgcttcaggatatttttgttgttgttaaaatcttttaatattcctttataaatttaaatttttttctcttttaatcgaatttatttgggcttaagagggcacaataatttatacccttattcactttctgagtttggaaacaaccaagaaaatagaggggtcaggaggctggaattcagagtctcgctggactacagagaacgtggcttagggtgaaagcacaggcatgctgggcatcattgctgctttgcactgatcagagaaggagagactttaaatgggttaactccatgcaatcaagaaaggtagccccatgtcaatcccttaccagtgaggtaacttccaatgtgggtcagaaggagtggattgagaggccgagaactgggggtaaccaaaagagtaagactaaacaatactctcctctcaatataattgttacttttgttcatctccctgtaaacctccctcccactcttctgccttttatctatggagtggggatgaggttgaggggagactcggcctacgactaccatgttggtcccacagctccacttagtttctgtcaagcacacatgagacaaggcatggctaaggtaaagtcctgactgattcgactggtaaagatgcaaggacacttttttagaatcagaccgtttattcattacatagatgacaaaaggaagactagccaaatgtgccaactccttgaggtcattgttctgctcatcaaaaagaatgacactgaaaccaaagggacttggagattgcaatgcgagttgggtaatgcagctcggtggttttgtgttctgccactctattaagagagggtgaagcaggaagacccacgtctcatcagaacactggaggtgatgagaaactgcttcatgacagcttcccaggtgagatcaggaggtgaaaggaagatggccttggagaagctctttgcaggtctccatcttctcgtgttccaggtggatcacaaggcatttggccaagactcaggccacaggagaagcagtgccaagagacaggaaggaagtggctctgccctggtgtatccacaaagggcatgcaggcaaaggcccatgctaatctgagtcttggccaaatgccaagctctttcttagctttggcttgcttccttttctctatgggtctctcagcttccccatactgtctcaccactccccccagaaaggtctctacgtgtttcatattcaaacatcccaagagggagcatctgattggttcagtttattgctttgccacaaaaagcccccaggttctgctaaattttcagaaaatacaagtttccatggctgctttggcctaagcaagaattggtggtgcactcaatggcaaacgagggccagggtcatgtgagtcatctgtaaccttggtgtgagaatgctctgtggctgttttgttccaaagtgggctctgtgtgtggcctacattcagagtttcaagaatagtccaatcaatctacttgaggctgtactggagtgagtagctcccttaaagtctctccaggttagggcaaagtcacaagaaatgaaatgtattataatcactccctgcttattaccattctaagagggaagatcttgaactggatgaaagtgattgattcttttcttagtttaaatgttggtttagttgtcccggtgtcttttgtgcctaggtgtgattgagctggttagattaatgggaacgagaagggtgaaatggaatgagatgcatttaaatcctattggtgataccttagatatctagagatgaaatctttatttcaggtgacttgagagagaaggttctcttgagcctttatgaatcaactgttgatgaactaaaactgtgtttatcagtctctctttcagcaaagatagaagttactgtcatagttcccctgatcagtgtgctagactggcacacatggggtcttctactgcaaggctgggaagcagaaactgtgtttcttggattctgttgcagttatggctgtgggtacaaataagcctccaccaattagatactttcatgtgaggattggaaggtggtaggaaaacaaagcctattttcatgctgttttggcatttctgccataagcccctaaggctgccgtggtttaaaccagaattcctgatgcactcatgggtgtccaggggccagggtcttttgtaaccttagtgtagggaatgtgatgagatgatgcatttttggcacctctttgccaaagataacaccttgctctccgtgcttacagatgtacaagggcagccgtggggctggcaacagcttcgtaatcctggcttcctgctttctgggtcaaagccctggtggtgtgttcttgatatcggtccatctagtggcgttgtttgattcctcccaccttgctgatcattcgtagtgtagcccccaaggtgagtcattctgttacatctgggacctattcccagaagcccattttagagcttgcttctctagcccatcaagaatttttgaaggatctgattcctgtattaaagcccttctgcttgagtggtttttgtttcctgcatgctgtatgacataattcctgtgtttatgattgttacaaagctaaaaacagccatggccaggcttgtgagctcacatcagaaatgaaattcagaagtcattcagaatcttaccaaatccagtttttactcttgatttaaaaatattttactttttaaaattaattattgtggctcgcccagacttggcagttagaattgaatatcaggaaaggttttaagacaaacctgacgaagaaagttgaagtagtcacagtatctagaaatacaagagggcctcttttctcaggcttatattttgagataaatttcctctccttagtacatgcagggaacatttcatttcatagttttgctgattaaaaaggccaaattatataaattacctggaggaggttttctgctattaaaattgtttatggtcagccgggcgtggtggctcacgcctataatcccagcactttgggaggccaaggcaggtggatcacaaggtcaggagatcaagaccatcctggctaacacggtgaaaccctgtctctactaaaaaaaatacaaaaaaattagctgggcatggtggcaggcgcctgtagtcccagctactcgggaggctgaggcaggagaatggcatgagcctgggaggcggagttggcagtgagccgagatcgcgccactgcgctccagcccaggtgacagagcgagactccgtctcaaaaaaaaaaaaattgtttatggtctgtaagtatctggccttcccaacttggttctgatggaccaaaatatagtatatttcccatgtctccctttgtaaagaaaggtaaatttactctttcttttattatgaattcatcagtttactggttattcttttttatattttagccagtttcccaccacagattgcaagtttgggttcctcagaccattgttttatgcaagaagcaggcttttggcaagtttcttccacatcaaattacttttccttctgtatattttatgcagaaatctttcaataacaagataagattgtttgcagcttttattgatctttactcaatatttgattctgtgcataggaaccagttgtaggcgagcctgcttacgtacaatattgaacccagtcctgattcttatgtagaatttgcatcttaacaccagtgcaaagacctgggtttgataagttaaatggttatttcaaaatgaataaaacagggatgttttgactactttgtttctttttgttttataatataatattacttttggatgagctaactgaatctgtccctctttccactgagagtaaaagtaataagtattctctactaatattattaagttcatagatgactctagcagctcttggtcctatttcctaatattatgtaaagaaatggcttaagttcaggcactgcattagttagcgattgttgtgtaacaaaccactccaaatctcagtggcttaaaacaacagctacttcttatttctcacaaaataatttctcacaaaaaatttctaaattttttgtatgcctaggactggttgggtggtttggctgatctgaccaagctttactgtattaggcagggattgtttatgtatctgcagtcagctggtgggtgggcttggggttggggaacagtgttggcaggcttggaggtctcagctggaacaattcagctgtgcatcacatggtctcagcctctagtaggttacctgggcttgctctcatgaaagtagagggtgccaagggagcaagcagcaatgtgtaagcaccttgttaaatttgctactagcccattggctgaagtaggttatgtggccacacccaggatcagtgtggcagggcagtatcaaaggctgtagatacatggaggcacgtaagttgaggacaatagtgcagtcaatctaccacggccactctaaaaccccagtccctgcttttggcaagagttttccaccattcatttacttggtgttcaacaacttcattcaacaagtttcttaagaaaatactgggatcaatttaccttgcaggattcactagaaagcaatattacttaaattaaggtgtcattttgatgtttcactgagctttttttttttcttgagccaccacagcaggtgactattaatatctgtattgaaaaaactctagctaaacattagtgtcatcattcttcgtgtcacagagcattggtgtcttactttcccatttaattatattttgaaatgaattcagaaatatttggagggcatgatattggtcctttctaaaggtacttgggtgttttgccttgggcaattcctcaattttcttggccttactctattacacagaaatctgccccctggactccaatttgagaagataatttctaaccattccttatccaatccttatcaaatgcctaattgcaaaaatttatgtttgagcaaaattccctcaatgccgtgcagcacattcccatttagataattaattttgccctcggatgaagccagaccattaaagttttagtcctttggaggactgagtttgataaattgcattttggtatcatgccattgtcttataataaggaaaattaaaaggaatggccaactatcatagactgttatctctactcgatgcctgtttttgatggatgtcaatcatttcattgcatggtatcctttttatatgacctgtgggaaaaatttatctcagcattcaaccatggtttttatattttatggccgctatgaatcttccaatgtttttgtttctctctttaactgctggaaacttagagccaaatgtgtagcccatctctaccaactctacagggctctggtgcaacatttctgtctaccactcttaacatttggttttactattttcctgattgttctttcttttttgctcagactatctcaacttaaaaaaatccttagtgattttatttgtttttgtaagccacataaagttctttatggaatcagctgggatgtgtgtgtgtgtgtatatatgtgtgtgtgtgtgtatgtaatatatataatattacctctcttgtttatgtaatatatatatctctgttttactaattctgaaataatcatttaatattataatatataatatatataattgtatataacatatgtatacacacatgtatatgtatatattttatgacatatatgtaatataattatatataatattatatgtatatatacatgtataatatgtatatatttttttttccaaaattgctagtttatgaattcacagatggtttggggttgattaaagggattagcaatttcactttagaataattttgttttttacttagaaggaagaatttataatttgtggcttaaactggaaacactaccacatcataagtagcacaacactaaagcataaaaagcaatcttgagaccttcttacattactatatatagattctattaaaaacaataatgggaactagagggtcattgtagaatattttttcttaaggtctacacactaattgattcatgtaagatggtccctgatttcttttaggtacttagcccatgagccagtacttatttttgtagttggattagtaacgatgcttgatggttcaaatgcttatcagccatcatcattctcacttgccctgttcttaatgttttggctatttttattacaatgatttcctctgggattttcattagggtcagtcattagcctcaggggaataaaatcaagggaggatctatgtgtctatttatgtagcagtctgctagagcaattacattttctcattgctatttgattagactattttctttcttaccagatattcactcctctgactctatgccaaatgcaccatcgaggtgaaagttaaatcacatcaggaatctcaatgaagaaggagggtaatggttaccaaaaatccttccaaaagatcttttcattccctgacatcatcacacagtgatttttgataacttaggcaaatatagtctaaacgcaattagaaattaactttctgagatgagtaagaaagtttatttaggaaatgcaagtgagaaacaagaagtagaagagaatatgtttgggaaatgtaataatgcacagtgacttatctcaagatgattctcagactttgccaaaaattcacaaaggaaaaaaaaagtcagcaaggaaaatgcctgtctctaagcccatattttctctcatttgaggtgtggaataacccttaagcccttaccggggtccttctggactgagaattgttgtaaagtaatactgctcaggttcgtaagttttataatcttctcacacagagcaaatgagaatggggtgggaatgtgcaagccaagagcagtcaaacctgccagtagtagcaaaagtgacagctagaccaacaagggcttgacatgcttcaaggagacttgctcaccagaacttgagaaacataattgaggcttttaggtgaaaccattgcattgcacgtagccgtgtattatgcttaaagtgatcattggctatgaataaacaaaataaagatccctgcaccttatttaagtggtcattggacataaaaagtgcatttaggctgaggcaggagaatggagtgaacccgggaggcggagcttgcagtgagctgagatcgtgccactgcactccagcctgggtgacagagccagactctgtctaaaaaaaaaaaaaaaaaaaaaaaaaagcatttaaattctatcaaaaatgattcaaagtttactaatatcttttggttcttgttggggtgagctttgcttgtctgcaaaattcatttatgtagaaaacctcgttctccccaatattgtatgtgaatgaaatgttactgtatttaacattaattgaatgccaacggcatggttagtatgttgtttgaaggaatgttgcgatggctttgatgcagaatcataactctctatatcccccaggtgaaagacaacttgagtggttaaattactgtcatgcaaagcgactagatggttcagctgattgcacctttagaagttatgtggaacgaggcagcagatcttaaggtatgtccgccttcccccaaccccttcctgtaaaactgtcgactataatcctgttttcagtgaaaacagggtgggaaaaatgtaggaaagaagcagagagaaatggaccttggaagtctcagctaaccattactgttggcaatctgtgggaggtcggcagactatttgttaaggtgctgattgaaactctgggacaccggttctttcccttaatacaaaaccaattttgagccaagtcatttaagaccttttgaaaactgattctaaaatagcatgtgatatcctgcggaaaaaataaaccatgatttagtaaactaaatgatccgtggagtaaggactgctttatatggtgttcttagagaaagagcaggcacagatgataaaatgtggccaggaaaaatcattggcacatctatgtgagttccagcttgaaatgaacttctcgaggttcatggccccgtaagtgtttgctgcccaccagctctggaaaatgagtggaaggattcccacccagcttggaaaacagaaagtccgcttacctgatgatgctctgggggaaattaaggaatgttggtgtcatttcatagtgaccacagcattgagtattgctccttcagattcattttgctctaggctgatcaacatttcacttccgtgatgagcagtgctggcctaagattttacttaagtttcattgataataaagctgatggtgagaatgataatgatggcaagaaatatagtaaagcctgccccacagtaacgagaatctggccaggtggtgattggcaatagactcctatcctctgctaaggccctgttctttcttcattaatcttgcaataacttgaccctgagttttaaagtaataaatattttggacttcacatattgtatgttagggttttatcatatatcaacaatgattatgatgacgtccccctttcctgagtattcactctgcacattgtgctgagtgctttatgcgtgttatctcagtcttcacgaccatcctgatgaaagtcctccaatggctttgaactgtacttaaaataaaaaccaaactctaaaccagttcctctaaggagtggcatgatctagctcctgcctacttcatgtcctgcgtcttttccacttgctctgccccagccacactaccttctttttgttcttgtgacatgccacactcattctctctgctggactttttcaccagcttttccttctgcctggacctctcttctcccagaccttagtgtggttgatgcctccttcaggtcccagattaaatctcgtctccccagagagggtttccttgacaactctgtcttcaggaacttcctcaatattccttttacatcaccctattttatttttatcctaaaagctaatactccctaaacattttcacattaattaattttaaaaactctctatctctgccaatttggatgtaatcttcctgagaatttggaccaaatatgttttttaattatgttcccagttctcagaacagtgcttggcacatgttaagtgttcaataaatgaatgaacctcagtttttggatgaagaagctaaagaacagagaggttaagctatgtcttaggtcgtatatctcctaaatggtttatgcaggatttaactgtaaatctaatgctcattttctttttcttttttttttttttttttttttgagacagagtcttgttctgtctcccaggctgaagtgcagcggcgcgatctccgctcactgcaagctccgcctccggggttcaaacgattctcttgcctcagcctcctgagtagctgggaccacaggctcccaccaccacgaccggctaattttttgtatttttagtagagacggggtttcactgagttagccaggatggtctcgatctcctgacctcgtgatccgcccacctcggcctcccaaagtgctgggattacaggtgtgagccaccgcgcccggtcgtgctcattttcttaatgatcatgctatacaacactatgagatttctgtacatcacacctggaatcacataaagattatagcttaaaactacacttagcttcccaaagaggaaattacgattgtattttaatctactcactaagtgagtaagagcttcttcgttgaaccactgtgcattagatagggaccatatttctcaaaagctccaaagtgtatgtctctgcactcaagagagagcagagctggaaaaacatttcacttgtgttctcataactctgatcaagatagatgcttttattttttttcagcattttaactatgaaaggtgaagctttaataggcacacaatttaggctgttgtatatattctggattaaaaagtttaaatgtaaccataagaaaaagcaaataataaatgctatcaccttttgttgtgttttcctgcaagtgtttattttaaaatatataatctgtttgacaaaaacacaagtttacagattgcattacattttcgcactgttttgaattatgtgtaagcaataaatataatttctgagttattccaaattccctttcataagctctccttaagttattttacacactgcaaagtttaatttaaccacgctagttttgtttaataggttaaaaggaattaaattggtcttaaattacgctgtgaataataaaaatgctaataggaaatatattccataacactagtgctgtatttcttaaagctattgaagcctggttatcattacagtcagtcttaacctacagatgcccaatctataaaatgagtgttggtgacacaggaaagtgtgtgtgcatgtgtgtgtgttgaagaaagcagagagagtctaccatttgggcgctgctttctctgatgatgatattaatttttctttgttctccagttcagaaatcttggggtgtgactgtacctgtgagttagcttccttgttttgcactaaagagtgctaacaagatactggccaggcgtggtggttcatgcctgtaatcccagcactttgggaggccgaggtaggtagatcactaggtcaggagttcaagaccagcctggccaacatggtgaaaccccgtctctactaaaaatacaaaaattagccagatgtggtggtgcatgcctgtagtcccagctacctgggaggctgaggcaggagaatcacttgtacccaggagggagaggttgcagtgagccgagatcgcaccactatactccagcctggtgacagagcgagactccgtctcaaaaaaaaaaaaaaaaaaaaaaaaaaaaaaaaagacactggtcctggggttgtctggcatggatctcccagacataaccctcatctctgaatcaagaaactgggagaagactgctcacaccacctgcagaaagaaggataatctgagagcccaagatgggccttacatttgtctttttccataaaaatactgttatatattagtgtttgataaagtaaaaataatgatgttattattatctatctcacatacattatgggttaatacgtatttgtgcccttgtgaactggcccagaaaaaatgagaaaaagatttctcgttccaaacaaccaaaatataaactgcctttgggaaggtaaccctttcctaagttaggggctgcttataatcacatacttgacaccattaagcttgtggctggtgatgtttgtggccttattatttctttactttgtctgccagattggatttagaaacatgaatgaagcattaacctcacaaggaaactgtactgaaataaacagcataaatctctaggctgagtttggccttttgccttctgtctttatataggatttccaaacaagatgtgtctaagctgttcaagagtgaaagcaagaaaaaagaggaaggaaggaaggaagaaagggaggaagggagggaagcaggaaggagggaaggatgagagggagggaggaagggaagagagggagggaggaagggaaaaaaggagaaaggaagggagtaaggagaataagaaagaaggaggaaagacaggaaggagggagagaaggcaggagggaaggaaaaaagaaagaattgatataacctaataattttgatactattcgacccatttccttgcctttattttcaccattattgaatcagtgatgacagcagtagatgcagtaatgtgaaatgttaactcatccattcatttattcattctgcagtattttttacagaactttgctgtttagtatttctgtattgctaagtagcctgcagagggtgcactttccttatttttatgtctttccatccacttatgaccaaaagaggacacaatgttttataagattaaaagagattattcaatgaaagaagtgaggaaggcacaacttctcttttctttcttctaccaaatgttacaaaatgaaatacgtaaaaggcgtagggaatgcaatctctattagcttctttgttttgttttgttgttttttttttgagacagaggctcactctgtcgcccaggctggagtgcagtggtgcaatctcagctcactgcaagctccgcctcctgggttcacgccattctcctgcctcagcctcccgagtagctgggactacaggcacccctaccatgcccggctaattttttgtatttttagtagagacagggtttcactgtgttagccaggatggtcttgatctcctgacctcgtgatccgcctgccttggcctcccaaagtgctgggattacaggtgtgagccaccgcgcccggcagcttctttgttaatagaaaaatcaattttagtgactttttttgcatggagccaggatcatcaagcctgtggccttcctcactttttttttttttaaaattgctgcatccccgggacttcgttttttttcttgctctttgtgtatgtgtgttcttatttttcctctctatactgcattggtcaatagaaatataatgcaagccatatatgtaatttaaaattgcttaatagtcacattaaaaaactaaaaaggaggtaaaattcattttaaaatattttatttactccaacttaccaattttatcatttcaacattttgtcaatataaacattttattgaatattttactttttttggtaccaaatctttgaaatctgctgtgaattttgcatttacagcacctctcctcttgaactggtcacattttaagctgtgaatagccacatggtaccagtggcaactgtactggacaacacatctatatacattcctttttcattcacaatttctccatccctaaccaaaccagcagaaaacagtgtattaccaaatggtgctgtttactcagaaaatctttatgactaattatccaccaatttgaatcatgcaggaaacatgagatggcctgtgttccctctaagagactgtcgtttacagttttgagattttaaaaaatagaatgtttttagccagttgatttttaagtcactctagttccctccatcacaaaatgaggtatagctcttaataaaagtccttcaattttattttcctgagtgtacattttcttttctttttttcttttttattttttcaatacagccccttgctctgtcacgcaggctggaatgcagtggtggaatcatggctcactacagccctgacctcctgggcccaggtaattgtcccacctcagcccctcaagtaactgggaccacaggcgtgcaccaccacatccagctaagtttttctttctttttttttcatagagatggagtctcgctattttgcccaggttggtcttgaacacctggcttcaagcagtcctcctgcttttggcttcttgaagtgcttggattacaggtatgaactactgcacctggcctgtccattctcaaatacatgatagtaactcccatctgctgagtgcttcctatgtaccaggtactatgtattaattgtttatacatataattccatttaatattcacaaaagtccttttgagttggatactgttgttatcacctttgttttaaagatgaagaaactgagcatggggagggctaggggagttgtctaacataatccagctagaatactgcagagctgggattgcaagctgggcctgcatgactccaaatcctgccttctgtaattttatgcatggtgtctcccaagtggggagtatattaaatgcaaatttaagatgttggtaaagggtagaattctagaagtggtagaaatcctagagttcttataatcagctctctttgtttttataagaaaaatctgaggcagagcgaggctgagtggtttctctgttgaacatccaggactggaatccaggattctgagtccaagcccagtgctctttcccctgatgagaaacctttccagatttaaaccattaacaaccctctctaaagaggaggcaagaggtttcaatttcttctcagggaaaaaaagaactgacatcaaaaggtctgtgcggggtcatttgtctcatcatgactttgatttggccttgatctttatttagtatttcagttttatgctctgcaacaagtttggccatgttggaggacaatccaaaggtcagcaagttggctactggcgattggatgctcactctgaagccaaagtctattactgtgcccgtggaaatccccagctcccctctgggtgagtattccgtccactttctggaagtctcaggttctgaaggctttttacacactgcaccatgggagcctaaggctggttgggcagcacctcattctgcagggatctgggtcagagcaggacaatggctctacgacgtgctgggtgttcttctatctccttcagtcaatgtgctaggattgtgatttcactttctcaccaggcaggggctgcagtttacaggagaaagactattcctgagtttgttcgactgtgctgtttttttactcctcttaactgattacaaatctctccaacgtctctgactcaggctcactatgacttttttgtttttgtttttgagaaggagtctctctctgtcacccaggctggagtgcagtggcacgatctcagctcactgccacctccacctcctgggttcaagcgattctcctgcttcagcctcctgagtagctgggattacaggcatgtaccactatgcccagctaagttttgtatttttagtagagatggggtttcaccatgttggccaggctagactcaaactcctgacttcaagtgatccgcccgcctcgtcctcccaaagtgctgggattacaggcgtaagcccctgcacccagctgactatcataagacttctatttccaaataatagctcatataataacttgtgtaaatatctacagataggcttcccttattatggatgcacaatccatttttcatactgaataatctgttaagagtatctctacaactattatttctcagctaatactgaattttttaccaagagcaataatattgttaaagactagaaataacccctccatagctcatttaataaggtaattctctttatttatgaaaaagaaagacctaggtttttttgtttgtttgtttgtttgtttttgttttgagatggagtctcgctctgtcacccaggctggagtgcagtggcgtgatctcggctcactgcaagctccgcctcctgggttcacgccattcccctgcctcagcctcccgagtagctgggactgccggcacccgccaccacgccgggctaattttttgtattttttttttttagtagagatggggcttcaccgtgttggccaggatggtctcaatctcctcctgaccttgcgatccacccgcctcggcctcccaaagtgctgggattacaggcgtgagccaccgcgcccggccgagaaggacctaggtttaagttccatctctgccacttagcaggcagtaaccctggtcatatcaagtaacttgtatgaatctcaatttccttaccactaagatgagaatgatgataattaccctccttctaggattactgtggggagcaaatgacttatatgtgaaagtgctttgtaaactgtaaactgtttaaaggttagtttatgtcacattgtcatgtatctgtgaatatcatttttgtaagtttatatgttatgctttaggcttggaccaatctaggtcatagtaattactctagggcaatggttctcaactgggggcaatttttcccccaggggatatttggcaatggctggagatattttggggtgtcacaaccagggatatggtacaagaatctagtagctagaggccagaggctagcctaaacatcccacaatccacagaacagcttcccgcaacaacaattatctggccccaaatgtccatagtgctgaatttgagaaactctgctagacagcagtgggttctcaaatgttagcatctgtcagagtcacccaggggaagtatcgaaacacagatggctggactccatcccaacattttctgattcagaaagtctagggtggggcctaagtatttgaatttttaggaagttcccaggtgatgctaatgttgctggtccagacattgctctttgagaaccatttctggagagaaatccttcactatgcatgggtcgctttgatagactactttgcttagcctactgagcaaagtagtatcttattaaatggtgcaaaatttgtatcaactagttgagaagtttgactctaggccaaaatcctttgtgtgatctgtgtgtgatttgagataatgacaaggcaagctccatggaaggaagaagctgcccttcccataccagactcggtgcacagccagtgccttacggtttcctctagggagttgcagtcaaggattcatgcgggtatctttcttctcacacctgtaatcccagcactttgagaggccgaggcaggagcattgcttgagcccaggagttcaagaccagcctgggcaatatggcaaaaccccatctctaccaaaaatacaaaaaaattagccgggcatggtggcatgcacctgcagtcccagctacttggaggctgatgtgggaggatggtttgagcctgggaggcggaggttgcagtgagctgagattgcaccactgcactccagcctgggtgatagagccagatcctgtctcagaaatgaaaggaaagggaaggggaggggaagggagcagaggagaggggaggggaggggaagggaaggttaggctcattcatttaaaaaaaaaaaaaaagagattctgttccaccaccccacccccacacccctgcacccacatgtatgcgtgtctgtatgcctagcccaggtgtctctattcagaggctgtctgttgggggccttggctgaggcactttcctccactttgactccacgcctttctactcctagccctttcccgtttcccagcctgtgggctataaagaggcaggagccttttgtgtggggcaggggctcatttttcttgcctgttctgcatgtcatctgatcctcacctagagctgttccagggggataaggggaatgtgggggagctggagccgtcctcttttgcctcttgcccgcactgttgtagaagagaataaagacctgattgttactctcagtttggctcattgaattaattgaccacctcaacatctgattcctcaaaagccagtattaagtattttccttcacctgtggtctcccaacttatgtgctgtgaatacaaatgttgtagcacaaaaacatctgctgtgaccaactattccagagcagtggttgagaactgtacatggtaatatctggggatcttgttaaaatgtttctaattctgtaggttctgggatggggcttgagattctgcatatctgaaaagctcctggagggatattggttttactggtccagggaccacactttgagtagcaagactaaagtgtcaaggaattaacaatttcatttaaagaattagaattaatacacagagaaacacaaaacaattagggcagtgccacttgatagtatcagctgtttaagaggaaacatgaggtgattttgaaacagtggtatttaactctgggctgcagctcagaagcttattattgattttctgcatgaaaaaatgtttttagaagtaggtgtttatagtgagaagtaggctggattaggagttgaaagtcacattttcagcctggtaattggccttctgagctgtgggatcttaggaaatttagtgtctaccagcttagttctactaggaagtagggttgaaaatgtacactaagttttgaaaatatattgacaatacacatagaaaacaccattcgtttacttgttcattcaaaatataccttaggtgcgtactttgggccaagcactattctaggtgctggggaatatatcagtgaataagacagatgcagttccctgatctcacaaagctcagagtctagtggtaaagagaaacatcaaagaggcaataataataataactagggtgaggttgatgatagggaaagcacaaagtgcacaaagagtttatagcaggtgaatgacctacatctaaaagtcaggtaggacctccttaagacaatgatgtttaagctgagatctgaaggcaatggctccaggcagagggatgatatattccaaggcccagggatgaaagagcacagtgaccagattgtgttcaagtatggttgagcacagagagtgaaagggagcatggctatgagtttggagaggcactatattcaacaggacacatttgattacaggtgccagaagccaactcatagaagcttatgtataaaagagaaattgttggtttactgaactgggaagtccgttgggtagagctggcctcaggcagagaaatgaaatcatccgatctatctctttgctctcttcctctcttctacttccctccatgtgctgctcttattcttccccatttcaggagcgcttccttcatatggttgggaaatgacagagtatgattacaggtagttcaaggtttacagcaacccagtttagcaactgaaaagaaaaaggaggtcacctttctttcagaacgcgtttaaaatctcggctaagaactctgataggaacttggaagagcaccatttttaatcctaggctaacgattgtggctgggggatgagaggagtattgtgattggctgtcccaccaaaatcacaagtaggggtaagggatactaccttagtgggaaaggagttgcagttatcaggaaaagagggacacataatactgggcagacagaacccaaaaatattcactcagagtatctagtaggaatttggagggagtatgcatactatggtaagcatggtttttcctaactgcagcatagatggtaagtttagttttgaagaaactgaagtgtctataagctatagggtagtagatagatatttagaacttattatccaaagaaaaataagaagagaggggaagaaaagagaaaaacgctcttataaataaaaaatattactattgttcataaaacataggaggtagaacaaaattaaaatttattttaaattttattattgccactgcaattccccttacgtcaaccttgatataccttttaaatatttaaggtgtaatgattacttcagttcttaggccaatagatagtcagatttgctacatagtctcccttacaagttttttttttattagtcatttcttctgtagacattatggtcaaataacacgatatgtagttatcatagcaattgatttcacataaattaagccaaggagcaacataatgaaaacatgcaaagatataatttatatgatgtttttaattggtcagaaatggcttactgactaatgttataatattgggattaatagaagtagaaagaatgttgatttctaccccccgcacccagattttagctcaattaacataaactggttgaacagttaaggttggacaacatcataaaaaatgtgtgtggggacaaactgtacattctataaactgttgtgtctgtataatttgaaggaattatagggaaaaaatctaggttgtatattacctagatttgcgctaatatgatagctatataactttgaattaattataattaaataaaataaaaaatttagtttcttggtcatgctagccatacttcaagtgccaagaggcacatgaggctcatgtctaccatactggacaataaccatctaggacatttccattatcacaaaaagttctgttggagagcaccagtctacacagcaccagcaagtcagttccctttctttggaatgaaataagctaaataaaatttttaagagggatttttctctccgtgtgctccacagtaagcactgtcaactctatgtttaagatgcatcccaaatctacccacttctctttttttctactgttactctctgagcctgagccatttttatctcccatctggacaacttcaatagtctcctgactcacccctctatttccattctttcaatttatatatggtctccatggagcagctggaatgatttttaaaaaacacgtactggttttaaatttcttgagaaaaaaaggaatgtgaaagaaggacacaatattttctgaatttccattacttgtgccactgtgcaccgttctttcaaagaagcgatcttctttaatctttacaataataaaggaaaagggaggtattataattcctttttgcaaaggcggaaattaggactcagagagggcaaataactagcttgtgttcacctagctagtaagtggcaaaccctttgaagaaatgaatggatgatttaaacagccaagtcctaagctttctactagactacctcgccaaacattattaagcactgaaggagatttgttactgggcttcttccttttgaggaagagagaaattctttgtatctttctctaccttatctgctcatttatctggactttgcctcctcagttatgagtatagcagtcccctcagggtgaagttgaaggtctctattcttttaattctcaaagatgccaaagtggcaggtacagttttgaccccatatggaaagggtctcctcccaaccaagttgggcttgctcttccacggtttagggcagtggttcactcatttttaggtctgaggcacagtttaaaatactagctttcttttcttttcttttctttttgagacagggcctgctctttcccccaggctggagttcagtggtgtaatcatggctcacggcagctttgactttctgggctcaagcaatcctcccaccccagcttcccaagtagctgggactacatgtgtacaccactgtacccagctaattgattttttttttttttttttttttttgtagagacgggatcttgccatgttgcccaagctgatcttgaacttccgggttcaagccattttcctgccttggtctcccaaagtgctgagattacaggcatgagccactgcgcccagctaaaatactagtttttgaaggcatttaaaggagttgaaagattcaaaacagctcacacacaaaaagccagtataataacaacaaattataataaaataaaacatctcaatatatataagtacagccatggttatcatggttgttattacgcccttcccctgctttgttccacatgttccatctgcctagcctcactgtatttaagagtctgtgtactgagttgtagcaaaagtatgttgtattccttttattatctttattgcagctggaaggatctctgtgaagatattgcaacataacagttggtcagagcaggttagaaacctcttcttcctttcctcttaagaaacagatctctatcttcctgtgacagactaatttaaaaaaaacaaaaaaggggccgggcgcagtggctcacgcctgtaatcccagcactttgggaggccgaggcgggcggatcacgaggtcaggagatcgacaccatcctggctaacacggtgaaaccccgtctctactaaaaatacaaaaaattagccgggcgtggtggcgggcgcctgtagtcccagctactcgggaggctgaggcaggagaatggcgtgaacctgggaggcggagcttgcagtgagccgagatcacgccacctcactctagcctgggcgacagagcgagactccgtctttaaaaaaaaaaaaaaaaaaaaaggaaatggatctcctcctcccacctttgtcctctgagcggcagcccgaatgaataggaagctgtcagcatcagccacgtatgccctggagagtcacaagcctcactggttttcggcatggctgcctttcttcatctcaattgagtaatcttcaaacccttgtttccccactccacatttcttagtataaatatcatttcagttcgcttcttgggctacggataaagcagaggaggggtatgaaattttagaaaaatagagatgaatactttgtttcagtccttaattttactgatgaggaaactgactactaagaggttgcagtaactttcccaaagtcatacagctagttagagtgtggatttcagagccacactggatttaacttccagtgctgtcatttactagctgttttgagtttgggaaagtcatgtaaatattctgagtctccgttttctctgtaaaatgaagatgataatagttagatcacagagttgttggttattgcaaactattacgcatcacctggaaaagtgtagtagttatctattacggtgttacagataaccccaacattagcagcttaaaacagcaaactttttttttttttttttttttttttttgagatggagtctctcactcttgtcacccaggctggagtgcaatggcacgatctcggctcactgcaagctccacctcctgggttcccaccattctcctgcctcagcctcccgagtagctgggactacaggtgcccgccaccacacctggctaattttttgtatttttagtagagacagggtttcaccgggttagccaggatggtgtcgatctcctgacctcgtgatccgcccgcctcggcctcccaaagtgctgggattacaggcatgagccactgcgcccggtccctctttttttttttttttaattagtctgtcacaggaagatggaggtctgtggatctgggattacaggcatgagctaccgcgcgtggccgcaaacattttttatcttacgatttctgtgggtcagcaatctgggtgtggcttcgctggatacctcaggctcagcatctactacaaagctgcatgataggtcatgcaaaatgccatttacatgggtgtgaaaagcaggaagtggaatcattggagaccattttccaggctgtctagcacagagtatctgcttcataatgattgatttgggattagatactgggtcaagtaataatgtcacccacacagattattggatcaatgttcacctgaaggctttgttctcagcctggtcttgtttaacatgtttgttttgttttgtttttttgagacggagtctcgctctgtcacccaggctggtgtgcagtggcgccatctctgctcactgcaagctccacctcccggattcagccattctcctgcctcggcctcctgagtagttgggactacaggcgcccgccaccatgcccagctaattttttgtatttttagtagagacgtggtttcactgtgttagccaggatggtctcgatctcctgacctcatgatccacctgccttggcctcccgaagtgctgggattacaggcttcaggcaccgtgcccggccacatttaacatttttatcagtgacttagatgatgatataaaacaatagtatctaatttttcttgattatgtgtcagtaaaaacttgtaagtgttcacttcaaatatatatatttatttataagttaacacatgtgccagtgttaatctattaactaatagtgacttactttcattcattctttagatttaaaaagttacaaatagaagttccattattttttcacctgaatcccaaaggattcttatgtactctctgggtgtgcaaaacccaccaacagagaaagtgactgagagatggagaatgtggtggatgtcacagtcaggatctaaagaaagtaccaagattggggctaaatcatgtaaacaatcaacatcccaggggcactgctggcacatgaatcacattgtggggatccttgcagaggtgccctctttgagcagaagaaagacaaagattatctccttctttagggaacagagtgtggcgaactgagtccaggttggatttcagtcacttctcatctgtgcctcttcttgtgcagtgcacaaaaggtacaacaatccatggagacctgtggctttccattaacaaagaggccgttcttggaatttcaagtcagttgacttaactgaggctcaagaaacagaaaaattaagtatatggtggaaacaagcctcagaaataaggctaaatctcagctttttaagacatagatcacacatttggccaagatatcaagactgacttgattctctctctctctctctcttttttttttttttttttttttaaacacagggtctcgctatgttgcccaggctggtctggaactcctgagctcaagagatcctccctcctccgcctctcaaagtgctgggattacaggcatgagccaccgtgcctggctgaaattgaattgattctatgaccttcttgttttcatctttttagccccaaaaggggggagactaggttccctttttaaaagtgtggactggataaatgactcaattctaaagaataaaatatgacggaatatgtataattaggtcatagaatgcctcatggcttctttcttattctctcttggattatggactctgggggaagctgccatgtggtgagggcactcaagcaaccctatagaggggtccatgtaatgaggaactcaggtctcctgctaacagccatgtaaatgagtcatcttggaagcagatcctccagccttggtcaagccatcacaggactgctgcccccaccagctaacagatcgattgcaactgcgggacagactctcagccagaaccacctagctaagctgctcccagattcttgacccatagaaactgtgagaggtaatgggtatttgttattttaagctaggggttggcaaagtactgctccaaggccaaatccagtctgcagcctgtctttgtaaataatgttttattgggacaaagccatgtctgttggtttatatagtgtctatggctactttcccattacaacagcacagttgagtaattgtgatagcaactatgtgacccacaaagctgaagatgtttaccatttggccgtatgttacagaaggaaggttcatggctgggcatggtggctcacgtctgtcatcccagcactttgggaggctgaggcaggaggatcacaggagcccagaagttccagaccagcctgggaaacatgataagacccatctctacaaaaaaaaaattaaaaattacagtcagacgcggtggctcatgcctgtaatcccagcactttgggaggccgaagagggcagatcacttgaggtcaggagttcgagaccagtctggccaacgtgatgaaacccttcatctctactaaaagtacaaaagaattagccaggcgtggtggcatgctcctgtagtccaggctacttgggaagctgaggcaggagagttgcttgaacctgggaggtggaggttgcagtgagccgggatcgtgccactgcactccagcctgggtgacagagtgagactttgtctcaaaaaaaaaaaaaattagccaggcatgatgttatgcacctgtagtcccagctactcagggaggctgagttgggaggattacttgagcccagaaggttgaggctgcagtgagccaagctgtgattgctccactgcacttcagcctgggtgacagagtgagaccctgtctcaaaactaaactaaactaaaataaaaagtttggcaattcctgttttaagcttttggagtaattttttttttcttgcacagcagtagatacctaatatggaggaaactgacaatgctttaatttgtgttgagagcacccagcaacacaaactcttgccatgatgttgtttacttttttccccttcttgatacatatttgttttgttgtagtttgtgtgttttttgtttgtttggttttttgcaaatcagtatcaggccttgtgtcccatgaggctctgctgctcaaagggtggtccttggtcccagcagcatcagcaccagcacagacaaccctttaaaaacaacagacattttttttttctcggggttttttctgttctcatttcaaaactattcttcatttctcctcttggcaagagctgtggtttacatgtaaactattgctgtctctgcagaagaaaatcactttccctacctttaaatgagttgacttctcattccattgttcgtggcctgtgttggtgatgcctgtagtagttgtttcatttccagttgcatggtggacagaacaataagcaaatcccccacgtggaggcaagctttgctgttttcaattctgtgctaaccagccttacgcacatgctgtgaatttgagaacctcctttgccgaagccgggaaagcttgtctggattagaaaagtcctccatagaaacctgacactgtcctgagctggagtatttggaatcacacacaggaaaggctgggtatttgctgacctgcctgaatggcagaatgtgtgtgcggttgtctccaattacagcactccaggaagcatcaccccaaaagtgcgcttgctatgaaccacagcgtgtccttcggctaatcctcgttagctgaggtggattctctttctacatgtaccctcttttcgaagtggtatccttcctgcagtcttttcatgccttggcctaagactctggacacaggcctagctttgcccccaccagatccattcgatagtttttcatgaatcaccagctctcctggagaaactcagggttctaattattgaagaaccatgcatagggaactggagataagccacgggtaagactttcccacatgtttcctaaaaagggaagaaggtctcattggaagccccctaacattcaaatggcaggagctgtctgatttccacccaagaatccagctctgagttagtggtgggatctaatcaccaatcattctctgggcaattcctcattttttgctttccgtctacaatgaccccatcactggaagtggagcttgccctggggaatgctatattgaaaaaggccttgctctctgatctttctcagtcctcctacaggtgatcgttcattctcttcctccgccttcccatgccatgctgatgattaacattcaacagatctgattctgccctgccttcttcctgttgctcattccactgagcctctcgagctctgagctgaaaaccaagatgataaggatgaggtctttggcctcagggaggagcttcctgcttagttatccagttatacctataaaggaataatcctagtactgtgtgattaatgatctaaaggacattcaagagctatgggatccttgaggaaggagtgtgtaattatttatctggagaagtgggatggggcaagagattccaggcagtgggaaaaaacataccagatagaggcacagggccatgaaaccacatggggaagagcttataagcagttccttcagagaaacagtcttttcataaatctcgtcttagaagctctgtgtggaaggggccagtgggggaggaggggcagtgacattcaagagcgttttaaatcacctccccacattgtatgggactaaggtgagtcctgtctggagttgatgcttggatagaaaaaatgcatatgatcctgtactctgactgttggaagagggctacatagagggagacagaaaaaaattctactccttatgaattctttttcttaaaatgttgctgaaggtagctctacaaaattaatccctggccaggtcttgcatggttcctggccttttcttcacaaaattgagaccccatgaacctccctgtcttctcatctgtaggctcacactaatccctaggctctaagatcaagccagactggggtataagtaacctatatggaatttccacacaaatcaggaaaaggcatcttcttctgtgtggtccagggcatgtcaaggataagactcctttgaaagtactaagaaaacggcactttttttttgttttgagatggagtattgctctgtcgcccaggctggagtacagcggcatgatctcagctcaccacaacctctgcctcccgggttcaagctattctgcctcagcctcccgagtagctgggactacaggcatgcaccaccacacctggctaattttgtatttttagtagagacagaatttcacctgttggccaggctggtctcgaatccctgacctcaggtgatccgcctgaaaaaggcagtacttccgaagaaagaggcacctacttctttaggaagatagactccaataatggggttatggcttggagagcattgctgagctgggttttatccccatccacttctctcagtctggggcccttgcactgatcacaatctgtacaaccacgtgtgccagttcgggaacatgacctctggccagaaagttttaaggatcagacatgagttcagtattgaaaggtttagaattgagtcactgctgccactagtccctctctagcctgatgtcccagctctgagcagtggggctttgtctctgcgtctcagactagtttctgccttgttatggttctgcacacagagcctcatgtggccaagctgttggagcaggcctctgccctactctccgcccctagccccatcctgaacacttgtctattctgccagtccttgaagcacaggatcttgctctttctgatagctttgtccaattctgtccaagctgcggcttgttggggaagaaagaaggcaggcctgtgtagggctttagggctgactgctaagagaaggaagatggctggcattcaaagtctggggtgtattaaagtctgacttaggccaggcgtggtggctcacgcctgtaatctcagcactttgggaggccgaggcgggtggatcatgaggtcaggagttcaagaccaacctggccaagatggtgaatccccgtctctactaaaaatacaaaaattagtcgggcatggtggtggacacctgtaatcccagctactcaggaggctgaggcagagaattgcctgaacacaggaggcggaggttgcagtgagcagggatctcgccactgcactctagcctgggcaacagagcgagactccatctaaaaaaaggaaagaaagaaaacaaaaaagtctgacttataaagaaaattggtctaagatgaaggatgaactctcaggaacagaaagcaacagtatagagactgccggcagcccaaacaagagtgatttcccttttgtgatcctattttgtttccgcaggaaaagtggtgtaagtgaatcatgataatcctatttctttctgcagtgatttagggtaggcctgttccctggttctggggaagtctaatgagagcctctgggaaagattttcttcccttgccacccccacctgtctttggaagttgtcacgtggggatgtggtatcttgagctgcagcagccatgttgagaccatgagcgaataaagttatgaaaaaaatagggacactaaaacaaagtgttgactttattgaactgctacattaatcaatcctgtctctggacttcttgttatgtgagaggataaatgtccattggttaaactatttttgttgagtattctattaaaggttagtgaaaataactgatatggaaattattgtttgctaggcattgtgctgcaacttcataatattcatgacaactctatgcagtatgtcttgctgttatctctctttttgtatatgagtaaactgaagttcagaaatgtattttgcccaacaacattgcaaggaacatacttatttacatatattttgataaatgggattagttattttcttgagttaatttcctgggaaggaaactacgagcttgaagagtatacatattgttattgattaaatgtctgtgtccccctagaattcatatgttgaagttcttaccctcattgtgactgtattttgagacagggtctttaggacctaattaaataaagtcgtaagagtgggaccctgatcagataggcttagtgtccttataagaagagataccagatagccccctctctccatgcgcacacaaaaaagaggtcatgtgaggacatagcaagaaggtggttgtctgcaagctacgaagagagccctcatcaggaatggaatcagctagcaccttgatcttggacttcctagcctagaactgtgagaaataaattcctgttgtttaagccctctaatttatagtattttcttatggcagcctaagctgactaaaaggtttttgacacctactgccaaattgtcctccagaaacattataccagttggcattcctaccagtagtatataaaaaaatacatatttccctgtgcttatatcagtactgaatgtaaccttagaagaactgaatttaaagtgcagtataccttacagcatctgggtatgtttggacaaaccactcccctctctgagtcccagtatcctcatttgtcaaattagcatcataataatccctgtcttgttggtgccatctcacagcactgttgggagttccaatgagatgaagtatgagaagatgttttgcaaactgtaaaggaaaacataagtattgttggtggtgttattcatctccctgcctcagtagaataaactgtagaatgtttaggaggtcaaatgaaacagtcaaaaataattttgcagtgttcagtcagctccaatggtgtgaaaattagtcaaaatgagaaatgcatgaatgctttggttacagtcttgaaggtcaacttgaatctgaattcaatgtcggctggacccaaataattttctagaatcagaaaattctacttcctactaggttgacattcgtaaccttcctggatcctatcagagaaaccttgttcatcatttcatttccaaattatgaagaccacctgggcctgactgaagatgcttgtttcttcctcttccctaacgccctttccaccagtgcggactgcaggtatggacatagggaagggtgggtaagtattaagtgctatgagctccgaggaagaagaaattccatatatacaaccagatagtgcatgtgtgtgtaatgcttattttgtgcccatttaattaatgccatgatcactattccttctagtaattaatttgattttcattagtaatagaaagatagatcaactccttgaaatcagagagagctttaaaaaatgctcagccaggaggtgttaagtatttcactaagtgtgagacttctggcaaaacccccatctcagcattcggttgttctctttgttaacagttgttggcagagatacaggaatagattttgaccagcaattccataagtactttactctactgaaatccattttttgatttataaactgcacatttaatgtaaatagcacattattcccctcgtcacagagttgatatagtaatgatgaatgtctataagtgataattactctgcatttagggttctctgcatgatctcggctcactgcaaccttatacaaaccttatacaaacagttatatctcaagctggccctaggcaaaattgtacaatggtctaataaagtgtcttttacttatatcttacgttctgctgctgcttcttatatatatacatagtgtagactcccaggagtgggatttctgggtcaaagggtatgttgaatttgtcttctgttattgtcagattgctctccaagaagacattaatctagcaatgtgtagtagatttctcctgcaaacccaccaacaagagatgttatctatttttagaatgttatgagtacaatgctgtataaagtgatatgatactgtgtacttacttgcatttctgtgactattagtaaatttgagcatatttttacttttcttcaagccttgtataacttttaaccattcacgttttttcttttactatcttccattacatctacagcaaccagccatttttctttaaacacaaaattaatctattttccataaataaaaaacacatccactattagaacatatattcatatttctttgccaccatatccctccatcactcacatcaattacaattttgactaaagtcattaactttgaggtacgtctactttttcactttctggaatttctatattcagatgcttgggggactaatgctctaatgttcttatcatcctgttgctccgttttttatctctgtatctttttttttttgaggcagggtctctatctgttgcccaggctgcagtacagtggcgtgatctcagctcactgcaacctccacctccccagttcaagcaatcctcttgcctcagtctcccaagtagctgggattacaggtgtgtgcccccaggcccacctaattcttatatttttagtacagatggaatttcaccatgttggccaggctggtctcaaactcttgatctcaaatgatccacccccgctcagtctcccaaagtgttgggattataggcatgagccaccacactcggccatctctgtacctttttgttctatttgctggtagttcctaaacttcatgtcccaccccttctattgaatttttcatttctgctttcatgttcttaattgtgaagaacttctttttgttctctgaatgtttcttttaaaaatgctattctattcgtatttcatggatgcaatatcttaaatctgaacgtatatattttaaaaagagttctctcactctcagcattgtctctcattgctgtttttggtccctgtcttccatgtaaaaaatgttccttgggggctgggcgcagtggctcacggctgtaatcccagcactttgggaggctgaggtgggcggatcacaaggccaggaaatcaagaccatcctgtctaatagggtgagacctcatttctactaaatatacaaaaacttagccaggcgtggtggtgagtgcctgtagtcccagctactcgggaggctgaggcagaagaattgcttgaacccggaaggtggaggttgcagtgagccgagatcacaccactgcactccagcctgggcgacagagcgagactccttctcaaaaaaagaaaaaacaaaacaacaacaacaacaacaacaaaaaacgttccttggatgtctcatcatccttagttgtctgctcttatttaacagtggggagctaagaggctggctggtgttctgggtgtgtcaggtgggcttatggagtacagagtgaccccactgtttggattggtgaggagctctattccctacccctccattgtcccccttcccactgcaccacatcaacatgtttagatctatcttcttgtccaagtctcttgagaagaatcttcatctcttgcctggagggtgagagcttgactgtttgcattgtggattttgagaaggactggaagtctacgtgttttcacttaatcccccttaagtccaggctggtgtagggagacagcctttcttcccccttctccaaagaatgaagcctaactctggggtgaggaaaggagggtggagtagaaagggattgaagagtctgactgtgtcttaaacagatttcaaaccatccttattttagtttctcactttgcccccacttccagaggcacctagtgcctcccattcctgagctttttgtgaatactgtgttgcaaatcaagttgattcttcacctttcccatggatgacttaaacccactgatgtgctaagccagctctcattcttatgtctgctttccaaacccagactttgtattgcctcctctccaatcctccacgtccttaaagctctgtcttctttcattgcaaaatcttttgttaggtcaggcacggtggctcacacctgtaatcccagcactttgggaggcctaggcgggaggatcacctgacgtcaggagatcaagaccatcctggccaacatggtgaaaccccatctctactaaaatacaaaaaaattagccaggtgtggtggcgtgcacctgtagtcccagctactcaagaggctgaggcaagggaatcgcttgaacccaggaggcagaggttgcagtgagctgagatcacgccattgcactccagcctggcgacagagcaagactctgtctcaaaaaattaaaataaaataaaataaaacataaaaaaatctttcattatagtttttggaaggactgaaattagatgcactcttcaatccttacagcagcaaatttttcttttattactttgttttatgtgtcttccttgcaattagtattaacctaggattttttaaaaaacccactctctgctttgtagtttaatgattgatgtattagattttatctcatatatctgactttatatttatttattttatacatttttatgttattttcttttttccctttctttggtaggtttgatcaagttcagtttctttcttttcccttgataattagtatattttttcattctgtgttcccttcctgtctctcataattacatagatctttctttatgatttttgaaaacaagataccaattatttccctaatccagatgtcttttaaacttcatgctttctccctccatcagaatacatttcttcattcttctgcctttcctcccagcaaacgagacctttggaaattttttttttttctttttttttgagatggagtctcactctgtttcccaggctagagtgcgcaccactgcaacctctgcctcctgggttcaagcgattctcctgtctcagcctcccgagttgctgagattacaggcctgtgccacaacacccagctaatttttgttacttttagtagagacgggttttgccatgttggccaggctagtctcaaactcctcacccgccttggcctcccaaagtgctgggattacaggcgtgagccactgcgcccggccccatttatctatatcttattttcttttcctcttcctctgtgccttggaatttcattatgatttaaactggcaggtggtttggatataggatttttggattgtgaccattttctctcaaaattctttttcttcataatttccatcgtgtatatttttgctttgtgctttaagatatttattctattaaatattttatgccactattttggacctcaacgtggccttcctttcttccaactcatgcaatattagttgggaaattgtaatttttagctccagactgacttcagacttgaatttggacttccttcactgttctcccagaggccttcccccatctctctttctcttggcatgtgtaaatctgaacaatccacctggttgctcgctctgtgctcactgcggctggagtgcagtggcatgatctcagctcattgcaacctctgcctcctgggctcaagcaattcttgtgccaggctggagtgcagtggcacaatctcagctcactgcaacctctgcctcccaggttcaagcaattctcctgcctcagcctcccctgtagctgagattacaggtgtgccaccatgcccagctaatttttgtatttttagtagagatggggtttcaccatgttggtcagagtggtctcaatctcctgacctcaggtgatgatctgcctgcctcggcctcctgaagtgctgggattacttgtaggcatgagccaccacgcccggccatataatgcctacttaagcatcaattgctggcctgttcagtgttgctcatatggttctggtctgcactgggcgagggcatttggcaatgaggaaggagtgtgcttggtttagaatagcagcttctgtggttctttttagaggtatcatttctgcccaaatctggggtgccttttcattgatctatatttgggagttaaataaaaggagagttttattctaattaattaaattaaattaaataatttacttatttttgagacagagtcttgctctgtcacccaggctggagtgcagtggcgcaatctcggctctttgcaatctctgcctcctgggttccagagattctcatgtctcagcctcccaagtagctgggactacaggcatgcgccaccatgcctagctaaattttgtatttttagtagaggcagggtttcgccatgttgaccaggctggtctcgaactcttggtcaaaattgatctgcccacctcggcatcccaaagtgctgggattacgggtgtgtgccaccatgccaggccttattttgtttttatatttatttattttttatttatttttgagacagggccttgctctgccacccaggctggaggacagtggtgcaatcacggctcactgcaacctcgacctctcgagctcaattgatcctcccacctcagcctctcaagtagctgagtctacaggtgtgagccactacacctggctaagctttgtattttttgtagagacaggttcttgctatgttgcccaggctggtctcaaactcctgggctcaaaagatccacctgccttggcttcccaaagtgctgggattacaggcatgagccactgcacctggctatgatttttaaaattcaaaagcagagtatagatggaaacctaaatgacggcaaataataataataataaactctcagagactgtagggtgtagaccaggccctggattaatgggaatgtctacattccatccccttgagctcaaatattctagtcaaagtgagtcacccaaggttactttcgatagaaggtgggtgtggaaagacttggacaagaaaatctaggagccacaggaggccagatgcttctctctacaggagacttgacctttgacacagagccctgaggaaatcttgactgttttctttagtatttgatcctcagctgatgcaaaccatttatttatgtttgcccattggacagcagggggtttgggctgttttcacgtctatataaggcagtgcagagtgcttcctttgatgtgtcccgcctctgctgtggcctcatcatgccgggctaacttggtcttccccatgtagggctctagatcccactcctaaaaactctaatttgaggatcagagtctgaaatagcccaaaaggtatcctgtttagcttgtcatttaaatagctaagcccctgctacgaccatttaaaaccatctcacctttcatttagctaagcagttcttttttcagatttggcttgtttgtgtttttctctattcactgcaattctgcatctataaaaagcattgatggaaggaggaaagagtgaaatcaacattctttttagtagagggccttagttggaattgcagaaatatcagggaacttagctataaaggcctccagagttatccctgagtgcagggggccagagtggtcacagtcatggcctggatgtgaaacttgacttcaaaaatgactagctttttgaccgtaggcaggttatttgacctccctttacctccatttccccatctgtaaaactggggtgataatagttcttgcctcataggtaggactggttccatagcttccagactcttgttcaaatctcaatgaaatgaaaatgctgggccccttgttcacctttcaagacggcagcagcatagcatcaaaccaagtgtgggacccctctgagcatgggccctgtgacacttgccaggaagctggccctgctcgcaggatcactgtgagaactaaattaattattctatttaaagcccttaatgtactacctgacacatatgcagtctatgtaaacattaattgaatctaaaaaatgacagaggagtaatctgggaaccagagaaattgttactagctcagagtaacgcagtgaattggtggtaaagcgagccttggattcgatctgttccgtggctttctgcatagtttacttatgtatactctagtggtttcttccgtgaagctctttcattgaatcagcatttttgaatgcttttctatatcccatgtgcaacagtaaacagtggcgacgggtagttcatgagttttgtttttattcgttatttctatttccagtgctatagcaggctacaataaatcttcagctatactaactctgtcactgaacaagccatgagattcttaccttgttaagtcacatgaatttagaagagtcaagtaaatgacatctgggatcttggtagcaacacgtgaagaaaacttataagtacaaatatttaaaaaatataaatgtaaatataaatgatggatgagttttctcgagtaaaatcagaggatgatttagatgatctgaaagaagccttctagctctaacattagtaacagaatcacatgggcctcaattctttcctactgcccatgtagccacaaatggaaagatctcgttgaaatgactattttttttgttcctaatgtgtccttaaagaaaattattaaaaatatctcaggtcaatgacagataaaattttcctaaagtcttcctttaagaaacccaaagagagtacaaacttctgtctgtattctgattcatcttcatttagtttttcttgataaacagggaatgtcattcttgttcattctgaatttcagaatctaaatttggaaaaagaatactaaaagcatgctaattaggctcttcaaagagttctttaaaaatttgaatatataaataattttatcattcagggtgtgaatcagctatagttagtccaaaaagctttttaaagcaatatactttttcatgttcaggaatgatttcctgatatataaataacttccattgccatggtacttaggccataaagggccctgcagaacacacttgtctaatttgaattgtttagattaatttggcaactggtgaaatatcactttgattctaattattgtcatgctcaccttgagtaaggctttttgtggtttaataatgcatactcttatttcaaacacaaaagcatctgtgaaatctgtcttaactatcaatatatttcttctatttgacataatttaatttaatttaatataattaatatacattataagatccttaaatctcaaaagaagataatctcctgtccttcactagaatttttctgttccaggaaaatgtcattttctatttgtggactcttctaggaaatcttcattcccatttagctggagcggtgatggaaagctattccttctctgatggacttaacaatgctatttctgtatctcatttgtgaggctgggcagccattcatttgtggttaatactgtaattcttaaaatgtatttttaagaagtggatagaaatatctgatgctccattttagtttgaatgctatcactgctgaagcacacacaaaactgtcagcaaaatgctgtttgtattggacaactcctgtgaattgaaagtagctaagctaaaaaaaggaaaattgacaggtgccttattaggccccagtgattagtcatttttgtgtctgcacaagtaattgacactcacttctaaacaaggattgtgcatttgcatgctttcaggaagaagtcctgctgggtgattctaatctactattttaggatgtgatggcttaatttgaaaaatgtttttatgaacaaaacatgatctctttcttgtcacttttttgaatgtcctcaggtttcacagtgtgatcagggactgaatggattttattcgggtaccaaatatccgatgactaaatgggtttggcagtaaaattgagggttgtgttggtaactaccttccacaggaagaagagattatctttattctgttcttttcttgacgactgctgtaaaatgtatttttggtttgttacaaaccagttgaatctttacagaattaaaaccagagaagaaattctgtggataattatttttttattcagggactggctccacctactacaatttagaattgtaagaaactttagagagtattaatttaatttttttaaattaaaaaaattttttttgagacggactcttgcactgttgcccaggctggagtacagtggcatgatctcagatcactgcaacctccacctcctggttcaagtgattctcctgcctcagcctcctgagtagctgggattacaggtgcgtgcaaccacacctggctaatttttgtattttcagtagagacagcgtttcaccatgtggagcaggctggtcttgaactcctgacctcaggtgatttgcctgcctcggcctcccaaagtgtcttaacttttctccatgtgtgtccctgacttttatgggtaccttccctattaggcacttgcatcccaggttcaatttagttccagaaatatttactgaggccctgctaagggcaaggcactgatcatgtgtctttggttgaattgggggtgacagtgggatggtaaatggaagcagcacaatgtggtactcagtgcattagcaggagaatgaacaaagggttttgggaggacaggggttgaaatgactacacagacaaggtgacaggagtgagggccttgatctgtgaaggcacaaagttggcaatgaggccatagtatctgaaaacactgagagaagttcggtgtgaccccactgtagggaaggtgggagcatgagatgagtatggaggaaaggaggacaaattatgaagggctttggatgccaaactaaagacgtgattctttaggcaagagtgagccaacaaatggatctttaaacattttaatttttctttaagttgtgcatgcgcatatgttaaggagtcaaatagttctgcaagatttattacaaaaatcccaagagggctcagccctcctacttcccatattccccattccagaggtaaacactgtctagatgatggtgctggtctttacttcccacttttatgagatgtgtttgcatgactatttcttgcttttaccagtctcggccattatctattggcttctccccatggaggatgaggatttggctctctccctgcatccccacaccatcccacacacaaataccctttctctgccacctcctttccacagtgtaatttttgttagatcaacattcagtactgacaatattaggctcgtgtaaatgtattcacagctgaggcaaatagtcaacgatggttatttttactttacagtagagtttcagccctgtccctggagggcaggctaaatttttgtttgtttgtttgcttgcctttttattccatgtactcatcactaattcaaccctaaaggtctttgcccttctgccaattgcctaaatgtcttttcaatatggcatcaatcaagcagtctaaccatttcctattcctaatggagccattcttgtggctttcagacctgcttctgtgaggtctggcacacagggtcactctgtgattcccttttattgtcgtcctgaagggccattttaccctgtgtgctgttgcgcctttgtgtttcctgtgttccaggctttctctttcctggtttacaccagcagctttttgaaaaacgtgcatgggatataagaattttgttgaagaccttaatcctaaaactttttttttttttttttgagatggagtttcactcttgttgcccaggctggagtacagtgacatgatctcggctcactgcaacctccacctcccgggttcaagggattctcctgcctcagccttttaagtagctgggatcacaggcacctgccaccatccctggctaatttgtttgtatttttaatagagatggggtttcaccatgttggccaggctggtcttgaacttctgaccttaggtaatccatccacctcggcctcccagagtgctgggattacaggcatgagccaccatgcctggcctttaatcttaaaacttgattgatagtttggtcagatatggaactttaggttggaaataatttttcctttagaatattgaacattagttccatttcctactggtttccagcattgttacggagaaatatgaaaacagttctggttattgattgtttttatgagatcttatttttttcctccttggaagcttgatcttttgtttccagtttggggaattttctttttttttttgagacagagtcctgcaatctattggtatctttgtgtctttgtatatttgtgtatttgtatctttgtatatttgtatctttggcaccaatgaaaaggtatctcctacaaaggcaatttgagccatataccataaacaggattttggtgtgtcaatgaagagatttaattttggcaaacaaattagctcttacactttatgagctctggaactttgggcaaatcattgaaactttgtaagtctcagttagttcctctataaagcaggaatttacagtagctgtcttaaaggggcgttttgtgcattaaattacatcatgggtatgaaaagggcctagctgagtgtctgggacatagtatttgccccacataattcatttctcatcaccttaaaaccagaatatttcatgggatttcgacatattctactcatgaaggtattaacatagaatgtttgagtctcttttctttctttctttttctttctttctttctttctgtttctttctttcctttctctccttctctctttcttttccttccttccttccttcttccttccttccttttctttcatcaatttgaggaataggctgggcatggtggctcatgcctataatcccagcactttgggaggccaaggtgggtggattgctttagcccaggagttcgagaccagcctgggcaacatggtgaaaccccacttctacaaaaaatacaaaaattagctaggcatggtgacatatacctgtagttccggctacttgggagtctgaggtgggagcatcacttgagcctcggaggttgaggcatcagtgagctatgattgtgccactgtacttcagcctgggcaacagagtcagatatatatatatagtgtatatatgagaaataatgcctttcttacccaacttcattcatgaaaccgtattgcaggcttcatctgttcaagtactctacccattatctacagtgaaggaaatggcactcaagtttgggcaatgactgtcttacctgggaattctgagggaaaaggtcttcccttcatgggtttgtaaagctggtaggacataaatgtaggcagctggtggccaactcatgggaaaactccatctgaaaatgaagctaaaataaagaaagctgaccatgaagtggagtaagttagttccctaacggtatcagttgtgcctttggtaaatcaatgtctaaacaaaaaggtccctggatttcctacttttgtgaaccaataattacctgttggtattcaagctaatgttaagttagttcttgactcctgcaactgaaagaatataggctcattcagagctaaacttcttttttcttttttctcattcacatgggaggtttggttggcatttggtcctttcttgcagtaggaggatgtccaagtaaagacataaaccagaaaggtagtgagccagatctttaatgagccaagcagttcagtgtttgggatttttagaaatacttcaatgagtttcctttataatttcagtaaagatatgaccttaacattgaagcttatttgagaaatgtctgaagggtacttaggctacatctcgtaggccttctgattttaagaggcttgtattcatggataaatgtagctgtggttggggaaaaaagagagagaccaacatttatgaacaccaggcactcagcactttcctcacaatgtgttcttgctgcatgaagaccaaggatgtcacaggcactagtcaaatttgagttgcaaagcaggccacagagggaaagtcctgcaagtactcagtcatcagcatggggaggaggaactcaaaccaagtgtacactacagaatgtgtcccatgttcatgtttgtgcacctgtttggtttctggaaagtgctccctcatgttaaatttatgtagttaagttgtaaaacaggaaatcttccttgaccctttgcaggatttgtgaaaggggtggcttgtttactgagcccgcagcactcaatcccttacgggatggggaacatgcaggtaagtgggtgcgggggccaggatgagtgcttctgggtgtcagcgggagcagaactttgtgcggccctgtgacagcatctgggggggtacccgtgacccctggagccctgagggcatgtattacactgcagttttttagctttgctgttcacggatggcttaagtgtttaacagctcaatgtgacagccctctgtatcctgagctctcattcagtgtccaggaagaatcaggttgcacgaacgaattgaagatggtaaattgtgggcgattttattgccaatgaaactggcttttagtggaatggagagctggaaaggggatggagcgggaacgtggtcttcccctggagtttggccatccactgccaaactcttcttcgaggccctgccgtcaagccgtccctcttaagttaagctgcttctcaccaacgtctagctgctgctgcttttctctacttctctgccgctctgctgccagtggcggctggggtttttctgggtacaggatgggggtcagggcaggccagggtgattttggaaaaggcaacattcgggtgggaaatgaggaatgcatgttcttactttgggccatgggtccaggtttgagggtggggtcctcactggggactgccctcttctacccagtattttcctgcctcctgtctgtatcaattgtattttaaatttgttactttatttgaatttaaattataaaattggttgataagaactttgtacatttgattttgtaagagttttataaaaagattatatatagttttatgcttatacttaagtaatgctattttcaaaatgaagtcaatactggagaagaaatgatcttttttttttttttttttttttttgaaatggagttttgctcttgttgcccaggctgaagtgcaatggcgtgatcttggctcactgcaacctctgcctcctgggtacaagtgattcccctgcctcagcctctgaagcagctgggattacaggtgcccaccaccaggcctggctaattttgtatatttttaatagacatgaggtttcaccatgttggtcaggctgatctcaaattcctgacctcaggtgatccacctgccttggcctcccaaagtcctgggattacaggcatgagccactgtacccggctgatcttttaaataaatgttattcgctgtctatgaagtagtcctgcaaaaaaagaaagtcacatctgaatctgaccgagtttctagatccaatggctaatttacagtggacagagagaacagagaagcatattaaaaaacattatggaggtgtaactttgggaactctatagtttctttaacaaataaatttgcaaaaaaagagggaggaagagtaattgtagatttataaatataaaaacttagcagtccatcatgtgtccggactttggatcttgattaaaaatttaaaaattaatggagaaaacaattgaaaatgtttgtgataaaattggaggtttgaatgctgtctgatgatgggtaatgttggggaattactgtggtggtggttgttggtgtgatggtgctatttggttctgttaatgaagagagtgctcttcctttttggggtacacactgggatattaacagatgatgagaaatttatgttttccttaggataacattaagaaggtaaagtaaatctatctatactataataacaagctttaaaatttggtgctgttagtccttctaggttatattcttgggaaagatataaatactaaaatataagataaacattattttctcatacagtcaaaaatattaaaggaaatttattctttctccaagagtctgctgtctaggtgtttatagaaaaggaacacaggccaagggtggtggctcatgcctgtaatcccagcactttgggaggctgaggctggtggatcatgaggtcaggagttcaagaccagcctggcgaaggtggtgaaaccccatctctactaaaaaatacaaaaattagctgggcgtggtggcaggcacctgtaatcccagctactcaggaggctgaggcaggagaatcgtttgaacctgggaggcggaggttgaggtgagccgatatcgcgccactgtgctctagcccgggcaacagagtgagactccgtctcaaaaaaaaaaaaaaaaaaaaaaaagaacacatgtgtcacatttaattaactttaaatggtaaactcaaattgtataaaaccatttaagttttcataaataaaatatttagataaaagattaatccatttagataaatagatagctaaatcaagttaaaaaggcaaaacagtggctacacacacatcacgttattcccatctggggaaaccctgagttagtccatgcttgcttgttggctatacaaatcaagggtccaaaaactctgaggatcaggtaaagtctgtcccacagcctgttttggtatgacccaggagctaagaatggttttaatattttaaaatatttgacaaatatcaaaaggagaataatctttggtgacatttggaaattatatgaaattctaatatcagtgtctgtacttttactggaatacagctatacacatttacttactgtttttgtaaataaagttttactggagtcatccatccatttgcatattgtctatgactactttcaacttagaacagcagagatgagtaattgtaacagaaagtgtatggcctgaaaaacctaaaatatttatctcctggccctctacaaaaaaagtttgtcaacctagatgaaaaaactgagtcctggaggtatgaagtctctggtctaaacttccacagcttttgaatgcagcatcacaatgcaaacccaggtcttctgaatctaggtaccctttggatgtggttttttcctatgtttttgcccccttgaaaaaatgatttctatttacatagtgcctgttttatttctggcattgttgcacgtacttgtattgctcttttaattgtcataacaacctgtaggacaggtactatgattatcccccattttatacttggggaatttgtggcatataatttattaagtaatttaaccaaagtcctacatgagtaagagacagagctgggttggagacccaggtggcctgacttaaatgttgcacattgctctgtctccttcattaagggaaccacaaagctagtgaaagagaaaccattgagtggttcagtggttctaacccctgtcattcctctcttgagctttgggggcacgaatgatatagggttgatcattctgctatcttaagcctgaagtgaactttgattaggaaaagtggctcccagttacccttaaaatcaaaggctgtgacagtatgtgatcagaaatccttactctagaaacatacaatttttctttgtcaattaaaataaaaagaagttcctgggggaggtggtgtcttgtttttgtcgttgagccttgatccttgctttgtggtttttcattgcattgccctacgagaaggtttgagaaggagtaacaacattactgcaagttagcactgcaagaaggcttcctgggaaacctgggaaaccttacctgacatttcactggggtcaggagcggaggaagaggctcctccaaagagcaatggcacaagaccagctcacagtatggaacaggtcccgtggcactttcttaccatggcctgcacatgcagtctcatgaaccaattggaagaggtgtttattcactggtgttttcttcaaacagatgtatcagtgcttcatagaaaagcagggttaatacataactttgggacttttgctttactaactgagaaatctgacaaaatttttttatggggatggagttgggaagaatgaattgaagaaagtggcagcaaaagaagagttacttctcccagaggactctgcatgtgccatacggcactgtggggggagctgtgccttggctgtccactggatgttcagtcaggataaggccgtccactggatgttcgatctggagaggctggcaaattatagtctgcaggccaaatccaggctgctctctctttgtaaataaagtgtttttggaacacagccatgtgcatttgtttcctgtttttgtcaataaagtcagagcccatccattcctatacatgttgtctatggctgcctttatgctacagaggcagagatgagtagttgtgacagagatccttaagagctcataagtgtaaaatatttctttctttctgtttttttgtttgtttgtttgttttttgagatgaagttttgctcttgttgcccaggctggagtacaatggtgtggtcttggctcactgcaaccttcacctcccgagttcaagtgattctcctgcctcagcctcctgagtagctgggattacaggcactcgccaccacgcctggctaatttttgtatttttagtagagacggggtcttaccatgttggccaggctggtctcaaattcctgaccttaggtgatccgcctgcctcggcctcccaaaatgctggaattacagatgtgagccaccgtgcctggctcacaagtgtaaaatatttctaatatggccctttagagaaaaattgtgctgacctctggatataatggaagagtgattattttgccgtcatggaatatttctttgttggagactaccggccgtatatgtcacatagcaatacagagctgactttaaaatgttggggaaaatgtcttctcaactattctctaaatgctatgaatagccattaaaatttcttttttaaaatttccagaatgagggtctacccagactactgagtcactatggcaaagcctgggaatgggtattttttaaaggcacctagtaatcaggtacttttgagaaacactagcctggaacataccaagctacatacgtattgagttgtactgagaaattgatattgcataattgtgacaatagtctatggtaggagtgtattattgatcataattcagaagcaagtctagagctcagtatgtgaaaagctccttgaatattattgaaaataactttccaaataactgtaaaaacacatttgttgctgaaaataataaaataaaaattatacattattgccaccatcaagaaacatactgttaatctgtttatatattgatgcagaaacacatcctttctggattgaatttatataattctattaaattcttaaaataccatgtagttattttgggtttcagttatgggaagggatttcacttggatttcagatttgttactctcttgaaagtgtttggataaagagccaagaaatacatcattgctcatatgggaacagaaaagctggtaaatgttaattgtgactgaaaaccttgaatttatgttatcagattcagaaagagaacatttagacaatttagatgtatttttttttgttcctttctcattgttgtcaaattatcttttaatgaaatctttttctttgtagccctttaccaactgggcatctaccacacctctcttgatgtcatttttgatgtcatgaggacgtagctgtcagtgttgcagctcacacagtgggcaatccccaggctcactttaatgattccagagagttctgtggataaagatctatgctgtgttggtgaggagctgttgacagtatcatagaaggcaatatttccgttgtgtttaatatgtaactgtctctttctatctctgtatggttctttgagagcctgatggtcagtgcagaaaaggaaggtgctacttcatcctaggtctgtccattctgaactgtcagtttcactagaattcagccacttccagtcactgactgccttggcaatgtcagtgtcaccaccagcttttctgaaggcagacccagggggccaatttgagagacagcacagatgtggtatctgctttcccattggcacacataagatgcaaaactttgattttcttggggtggaacttgggtgtcatgataaagatggctagtgtcagatgaacctggatactggaccactgaagaaagtgatacttttgtctcctccaaacaaaagctgagagtcagacttattctaaaaaatttcaattaaatttttttttttttttgagatggagtctcactctgtcgcccaggctggagtgcagtggcacgatttaggctcactgcaagctccgcctcctgggttcacaccattctcctgcctcagcctcccgagtagctggggctacaggcgcccaccaccacgcccggctaattttttgtatttttagtacagacggggtttcaccatgttagccaggatggtctcgatctcctgacctcatgatctgcctgcctcagcctcccaaattgctgggattacaggcgtgagccaccgcgcccggccaattaaatctttgatacggagtgcatcctggtgtagtggaagtagcttgaactaataattagaaaacctggatcctatctgggttcttaattctattatggtcattcatcctcaagcctgttatttgaattgtctgcgtctcaatttgctcatctgtcaaatcgggatggcaatactgacaaagactattgtataggatcttctggaagattaaaatgaggtcgtgaataagaaattcacttcgataaattataatgcattagtaagttttattataaccataaaataatattaaaacagtaatattaattcctgaaaagaataagcttatatgtgaatgttttaattgtctgagtctgtacagctttattgttgtatatatcataacaaattagccttccattcattagattaagaaagcctgctgagtccttttacttgtatatttaataccttttgaacagttgtcaatttacagaaaaaaacggagtaaaatgtatggaattcccatatatttcctcatccctctaacccctaattaacatctttgcttcaattaatgaaccaatattgatacattattattcattattagtccatagtttacattagggttcactctgtgttgtacattctatgggtttggacaattgtgtaatgatgtgtatctaccattacagtctcatatagaatagtttcactgccctaaaaatccctcatgcaccacctattcatccttcctttttctcttcctgaatccctggcaaccactgatctttttacagtatccacagttttaccttttctagaatgtcatgttgttggaattatacagcatgtagcctttcaagatttagcttctttcatttagtaatatgcacttaagatacttccatatctttttgtggcttgatagtttttctttttatccctgaatgatattccattgtcaggatataccaggatttatttacctattgaagaacttggttgcttccaaattttggcaattatgcataaacctgctataaacatctgtatgcaggcttttggggaaataacaagaagtgtgatttctgggtcatgtggtaaaagtatgtttgcttttgtaagaaactgcccaactgtttactaaagtgggatatactattatgttttcattcccaccagcacggaatgaaagttcctgttgctccacagcctcaccaacatttgatgttgtcagtattttgaatttgggttattccaataggtgtatagtggtatttcattgttgtcttagtttgcaattccctaatgacatatgatgttgatcatcttttcatatgcttacttgccatctgtatattttctgtagtgagatatctttcagatcttttgcctattttttgattgggttgtttgtttttctgttgttgaattttaagagttcattgtatattttggatgccagtccatcatctgatatgtattttgcatattttctttcagtctgtggcttgtgtttgccttctcctaatatttattttgcttatttaacctcaaaaatcacaatccaattattttttaagtaccaatgacatccaggtttacagtttttaaaaaggttgacaaatcctaatgctgtattcttatttaccattgactccttttgtggttggttgcatttgaagaatgaatcgagtcatcaagcccaacatgggctcaacctcaaacctcacattcttaaccaggatcctcgctgctatcatctgagagtcagcctgtggcctgtccaagttggctgggtctggctgagctgattggagcggccgacatttttgctgactggagtcatgctatctttgccagtttgctggaatagacacagacaccgattgggtcacgctgaagacattcctgtcttgtgaagcaagtctgtttgtattttaagtttgccaggactaatgaattaaaacatttggactccccacaacttgctgtttatcaatgcctctgacaggaggagggttttcttttgctcttgctttttctagaaagatgacaacatcctggctgttagagaggcaaggaaaggagagaggggttgtgaagggaagcggaagggaagggaagggaggtcccgtgggacgctggggtctggggcagagcaggtagcagcgtgctgccctgacagctgtctccgctcctcagattgtcagtggctgctatgcagcaggtgcagcctggtctctcactgagtctctactccacaaaggcaacgactggccaaggcagtggctggctctgggttacacaagtgcagacactcaactaagtgaggtaagccaacaggtgtgaaaactgaactaaatgctcagatcagcagcaacttaaccaaagctctgttacagcctgtagccaagagaaggaacctgtggttcgtttccccagacggtgtgatgaaaaggcaagttggtgtaggggcatttgtggtcaacatggtgtggaactcaaagtccactcagtcttgccaccatcctttcataggcagacagatgttctccattgagcggaggggagggactctaattagctgtgtttattaattccatttcctgtagctggaaaccataccagaggactatttacaaaatccttgaggcaaatttctacctcttgtacttgatttcttggtgcgggaaagtgttgggggatttagccaaaagaggagtgcaactttccatccttagatgttatgctaaagtgattcggtgattgtacaatgcataacagtaaaacttttctttttagctaaaatgttaagggaattttaatggtttcttctgttgaatttgagacaatccatgccattccctaggtggctaacaaaatgcttgattctgagcaggtaagactggacagaagggtggcagagttaagataaaacaaatcctgaatcaaataacagatattttatattactcttttttaaaattaaatgtttcatgtcactatttctttctaacttagaattacatgatatggacagtggagagctttttggtgcattgctacttgtagtgctaaataaatgggccaaattatgattctaactggataataaacagttgctggtttttctccaaagctatactagggttttaatataagcctgatcttttttcatatgctgggtaagatgattccatatgtatgtatgtctaaatatacatgtatatatatatgcattggctttggctctataaatacttttaaaaacaaaattcagtgttctggacactatttttagatagatagaggaaagttatgggaaaaagtcagaaaccgtgctgtgagaaaatgtcctgctaaagcatttcccagaatctctttaaggatggctaaagagattatttatactttgccatttttagagctatttcccttaaaatatcattcaggttttttggtttactgtctacatgagaaggaaagtagagggtttaggggaggtgggactaaaaatagaaaagttaaatatatgtttttaaataagaaagatatcatgtatttataactatcttttcctagtcccctatagacatcaaattatcaaatatcttggttaaaatatatttgggctaagttctctgattataaccagaaatattcatgtgtttttgcccattccattttatctgcaggatgttttttttccattcattctaccttaattaattaaatgatgatttgatagctggagtagaatatctataggatgtttttgagtcttgtctttgcttttatagagtgttaagatgtgcatccttagaaatgtttggtagacttacaggtagttaatcagatatttaaagcatatgatattcatcatataacagatattttaaagtggtttttggtattctttatttatttatttattttagacagagtctcactctgtcgcccaggctggagtgcagtggtacgatctcggttgactgcaacctctgcctcccgggttcaagcgattttcttgcctcagcttcccaagtagctgggattacaggtgcctgctagcatgccccactaatttttgaatttttgatagagatggggttttctcatgttggtcaagctggtctcgaacttctgacctcaggggatctgcctgcctcggcctcccaaagtgttggggttacaggcatgagccaccacacccagcgacttttggtattctttaaatgattccatgaaacccattctttgccactctcagattaataattcagatttaatttaggcttttgaacatgaaaagcaagtctaatctgaagccatctgataccttattaagactatatctctttttatcctcctcagttgaaagtaaaatactttatatgaccttaaagaggcaggattgaactggtccgtgtaaaaagatattgagcaagtaaggcaggtagagatatttcccatatttcattcattctagatgtatattgcaaaagcaattttttcttgagccaagaaaaaaagatttaaatggggcggatgaatacttttgacatagaaaaagctcaaaactaggagtatctttagaataagcaggtaatgcttactaaccttaataacttcacctgtaatttccaagggcctctgagtatttagggggatgatgctggataaagtgacaatggctctctcttgctgtcacagctggaagacccaggagaaggcggaggctcaggtgcccacatgatcagcacagccagggtacctgctgacaagcctgtacgcatcgcctttagcctcaatgacgcctcaggtatactctgctctggaagaaggattgtttccttcataccccacctttctagcatcttttctaatgccacgcctctgtggaaaatttaaagttgcatgcttgcatgacctgatgatggggaatgtgatatttcatcatgcattgttagatggcggcttccagaaatgcctctagtgatgctttcctccaccttgagttttcgggtcatttaaactcattttttttctcctccctccccattctagctttcttttagaataaaattcactgagctacaacaatttctaacaatagcaaagtgtgttattgttaaaactgcatgaggaaacttttattaggagctggcagttggttaggtaatatgaaaatatcactgttccgtttacagcaacatttgctgaagcgtaagttagaaatgctggtttctcactggtgctcccacacttctggctaaatcaacagacttcagcaggaatgataaatgggacaggtgaggaggagcctctctaaatagtaaggtctgaggtgaaactgccatacttagagcccttcgtcatggctcccctcagtgacctcttaacacacattgaattgcaccacttttgaacaaaagacctcatgtggcgggaggtcacggtgctgaggaaaggaaggcttggctctcttccactggcatccgccattgctcttagtttaatgtcatctgttaaaatcacatgcttaaacaacattaccatttaaaccttgggtcttttgaggactctctctctctctcttgctataatgcccatgtagggatgatgctttaaaaagtaatgattggccgagcatggtggctcacgactgtaatcccagtactttgggaggccaaggcaggaggatcccttgagcccaggagttttgagaccaccctgggcaacacaggcagacctcatctctattttaaaaaaagtagtaattgaaaagggacagaatcattccaaaataatgcaaagtaaggagctctgtgaaatctgatgtcacacaaccattgcaggcttggggttactatgccaggtgacacatttaacctggagtttcctagactgttagcctccagtggaggatgtattccgtagcaggaagaggtgaaggcttgactcttcataatcagtttttccaaacctcttctcatgatctgccgttgtactgtgtcctcactcagggtcaccctgaaagacagtggtgagaagaaatcctcccaacaggcaaatcaatccaccccaacatagaaatgacaactgccattaactatacttctctgtcataataagcatttgcctgtattatctctgatccttaagacaaccatgcagccgggcacggtggctcacgcctgtaatcccagcactttgggaggccaaggcaggtggatcacgaggtcaggagattgagaccattctggctaatacggtgaaaccctgtctctactaaaaatacaaaaaaaattagctgggcctggtggcgggcgcctgtagtcccagctactcgggaggctgaggcaggagaatggtgtgaacctgggaggtggagcttgcagtgagccgagatcgtgccactgcactccagcctgggcaacagagcaggactccatctcaaaaaaaaaacaaaaaaaacaaaaaacaaaccatgcaacataagcattagtattccttatgtacagacacagagattgccacccagagaccacactgtttgtaggtaatggagttatgttctgaactcagggccctaggcttgaagtctgaactttctctattttcgatgctgcttctctaaaaggaaaaatgaaagccctttctgtttttatacatttcataaatgcaagatttcaaggaatagtcagtgcttttcatggcatcttgagtggctagctctcaagacacacgcgtgcaaacccaaaatccagagggaaggaaaatgtataatttcctttcttttttactcatgctgcatgtgagcagaacaagtcctgttacaatcaacagcctcacaaagaaaatttcagtatataaagcttatttatctcaggcagtattaattttggaccaaataaatgtactgttcccctgtcaacattttaacaggaacttaatttatgtacagaaaagagccatggagaggtgaatctccatctttggtttgcctgaataacctctttcttgaaatacaggatgtacaacttgcaattaatttgtcaccattctttgaactctcttggcccttgactaggagctcacagatgtttttcatccatcagtttagactggtttgttccagtgtctttctcttctctttcaaatgactccagaatgcccactttcaaaatccatggtttttaataggtagcctcaaaaaaggattataatttattttaaattattcctaccctctagccccaccaaaagatgcttatgaaaaaactccccaaattaagtattttaatcttatggtcagtgtgtcctcatatctctagaaagggcacctacctggagaacctagggcaggagctgaggttcagtgtttctcaaccttgcctgattaaaatcatcacctgagaacactcattgaaaacacgtgttctaaggccccactcctatatattctgattcaggagacccattattgttgtaagaagaaaaagaaaacctcctcctatgttttatgcatatcacaaatgcaagatttcaaagaatagtcagggcccaggactctctatttttgcatatacatgaggctgagtgcacaaaaagatgctttgcagatatttgggacactccctttaaattcttgaataaggaacatgtggagtgtcacacaggaaaacacttgccatcaagcgagctgtgcatgccttttgaattccagtgcatgtggcctgcagaccacacatttagggggaaacaaaggaaaaccccctagactttcatagtaaatgagggcactaatgtggactttttgggagtaattctacattgttggatttattgttgatgaataagcagagtccatgagaaaaggaaacatctttgcttgtgaatgttgacatgttcatttttttcttttcttttttattttattttttttttgagacagagtctctctctgtcacccaggctggcgtgcagtggtgcaatattggctcaccgcgacctccgcctccctgaggtgattcttctgcctgagcctcctgagtagctgggactgcaggcacccgccaccaggcctggctaatttttgtatttttagtagagacggggtttcaccttgttggccaggctggtctcgaactcctgacctcaagcaatcggcccgcctcagcctcccaaagtgctgggattacaggcgtgagccaccacacctggcccgacatgttcatttctgataagcctagcctagtgctcatttcatccagtcatttcaggactatatattcctgagatgatttagtgtagaggttaaggatatggctttacagccagagaggcatgatttctagacctacctccaacactatttgtatgatcattccaccttgctgaaattcagtttcctgtaagatgcgtatagtagtaattcacagggttgtaataagaagccaatgacatcttataggtaaagtatttagcagagtgcttgatacaaattaagcattcaacttacccctgaaattatgataattgattgtggagtataagggaaatgtaaaccactaagcagttgtgtctcacctacatctcaccttgatgtcaaggtagattttatagcattactgacctgcagttatttagggactagttatgcagttaatagattgttcatatcctattttacctctgggcaattagctgaatttatttggtttcggtgtttccagcagtctgccaaaggtgggtgggatgtgcaaaagagaacagcatgacctcctatgggctttgtaaggcaagatgtttggagaaaagtctgtgtcacccagagcagttagtaattgcttcttggaagaggtgatagtcaaactgggcttgagggcaggtagagtatagaggagcagtacaggacagatgccattcctgggtactagatacaaaaaaggggctacatatcttgtaaccagttttctttcttttccctctaaacagaaagcaggagcaaaacttaagagtcaggaagaacatggtgtgttcagaaaagactaaaactagtcatttggagcaagactaagactagtccactgagctgtggaagagtaacgtgttgtctaccgagccctgcttgagtcagccattgttttggatacttacatagggtactgtttagatagcaatagactagggttaccaagtcaatcttcaaagttcagcaaggggtctggacttgatcaaaagcgatgaagtgtcaaaagtccttagaaaagggaataatatgatgaaagtggtaaaaatttggcggaatagtctggaatgtggagagatgagagaatggaagaggcattttataatggtacaaagtgatgagagcctgcattagataatgtaatgggatgacttaattcagggtccattttgaaagaagggttgaaaggacttggtgacagactggccctggtagatgaggagttggtcatttttcagtgatagcagaatgagctgtaagactttgaatagaacatggacctccagaggtccttaaataaaggaaacaaggttttggagaacacaaatatatatatattccttgacaatgcaatctccattttcagcctatcatcagagtgctttttaaagtaaacttagctaatggtaattcccagaggcagtgatgcctgtctttaatgagctaatgatattaatgataatcagtattatttctaaactggaaatttcaaagagtcgaaacttcctaaactggaaacttcatggagttaattttcttaatagaaaaagtgcagaagaaaaatatgaatcccacctcttgggttattcaagaatcactggcccttctccagctagagggaatttagagttggacagacattaggatttcatgtcaattatatgagacttttcttcatcttcagctaagctaaaaactggcatgctccttgtaaatttagaccttggctttggaattctttctgtcttttgcattttttagaatagttttttgtttcgcttagaaagagtcaagaatactagtatcagctcaagctggtagcttttaatattttgtttttaaaaattctttctggccaggcacggtggctcatacctataatcccagcactctgggaagctgagccaggaggatcacttgaggccaggcaagaccagcctgggcaacataatgagacctatctctataaaaaaaatcaaaaaataagccaggtgtggtggtgcatgtctgcagtcccaattcctggggcacttgcttgagtccagaggatcaaggctgcagtgagccatgattacaccactgcactccagcctgggtgacagagcaaaaccctatctcaaaaaagaaattctttcaagctgttagaaattttttatatctggatatgaattaatcgtatgacacttagtttttgtgttttttttggtactccggaacccataccattggtgtcacttttaaataatacagttttctcctcaaatatcaggatgttttgtgtggtagggagaattacatggagtagttgcaatagctacctttgaatccaatgcaacaagttgggtgttatgtgagatctttttgtgtgtacttctaaaactggctctcagcaaaattgtggtgcaggtgaagtgtcttcttatttatcattattttttaaggctagtcaagtgaagcactgggagaagagaaggaacaaagaaatctgtagctggttgtgattaagtagttgtaaacaccattgtactcggaccagccacaaagtgtcttttgtcactgtcctcttccttcaaccttttctaccttcagtattattccccttgtcctcctcaggatccgaagtaatcttcggatctagtaatctcttctctccacacttttaatcattgttctctggaataactgcaaaacctcatctgcactaagctataaatgaatattgagtttaccattttcccctctcttcttttttttttgagacggagtctcactctgtcacccaggctggagtgcagtggtgtgatctcggctcactgcaaccttcacctccagggttcaagccattctcctgcctcagtgtcctgagtagctgggattataggcatgcgccaccaagcccagctaatttttgtatttttagtagagatggggtttccccatgttgaccagtctgttctcaaactcctgatctcaggtgaccgcccgccttggcctcccaaagtgctgggattacaggagtgagccacgacgcccaggccccatctctggctttttttttttttttttttttttttggcatattcacagggaactctgtaggaagtcaagggataaagttcccactgggattttagaaaccaggaaccaggtatttgcaggaaactgaggctcagatagtcattatgaactctctcgaatcaccttctgtcccaacatgagcttacatttaaagccgcctcagcatgcagtgacaacattcagtcacaagtgccttaagggcatggtggaaggtgggtgtctcctgtatttacatttctgatggagcacagagttgagaactatagtagaaactgaattatcaaatacttataaaatcagtaatacactatctgtaacaacttggggttcattatcctggtgtcagatgaagagtctgagatactatgggatttattggttggaatgtattacttaaagttgtgaagaaaggccagaaagaaggtgagtgttcattgagtactaaggagtagtgcttttactggcatcttctcatcaatttaatattggctgcaaccccacaggaaggtgctattccattcattttcacaaaagtggaaataaatgtttgctaagtgaggcgaagtgacttgcttcaaatcatgcaactaatacatagaaggagggttcaaagcccggtcctcaggactgttacttcattgcccatttagaggcagagttcatgttataagagaaagctcaaagcttcttgacaacaaatagcttcccgacaacaaatagcttcccaaaggccatggggttgatggaggaaggttacttctggtatgttgtggtaggaaagaagaaaagaaggggtaaattttatttggtggtgtgctgaaggataaatatacttccaataggctcttgtttgctcatttatttctttatttagacaggatctcactgtgtcacccaggctggagtgcagtggtgcaatcttggctcactagagcctcaacctcctgggctcaaactatcctcccacctcagcctcccaagtagctaggactacaggcatgtaccatgatactcggtttcttgtttattttttgtagagatggcatctcactatgttgctcaggctgggcttggactcctgggctcaagcaatccactcacgtcagcctcccaaagtgctgagattatgggcataagccactgccccagccccaataagttcttcttgaggcaggtgttttttggacagtgagtatgttataacctaagtcagtcaaaatattctaacaacaggataaatagacactcacaaaatgatagctacaataatagtgaataggtgtttccaagaaacataaaatttgtccttggctgggcacagtggctcacgcctgtaatcccagcgctttgggaggcagaggtgggggatcatgaggtcaggagatggagactatcctggctaacgtggtgaaacctgtctctactaaaaatacaaaaaattagccaggtgtggtggcaggtgcctgtagtcccagctactcaggaggctgaggcaggagaatcgcttgaacctgggaggcagaggttgcagagagccgagattgagtcactgcactccagcctgggtgacacagcgagactccatctcaaaaagaaaaaaaaaaaaaagagagaaattgtccttaactgaatcaagtctcttttttgcatagcaaaaccagtctattgatgcatgatcttgttagcctgacaattttaggtactggttaagataacatcatgtttattaatttacaaagtattgaaaacctgctttgtcatcccaaatctctatctttatccatatctgtgttaatatccacatccatctctatagctatacttgtaatcttatgggccctgaaaatccaatgtatattaaataattcacatctctagtgtttaataagcaggaagcaaagttttaaaaagcttttgttgtgtcttaaaactatgttatactctaacaaggacttgggtatctagcaattaattttttttgatatattgggaatgtgcattggctactttttatcacatattttattcctaaaaataaaatattaatttaaatttagatttaaaatgacagtactcaaagaccttttatgcgtaagttaattttttttttttttactatctttcatataaaaagtgtttggaagtaaattttgtttttgagacaaggtctcactctgccactcagactggagtgcagtagcatgatctctgctcactgcatcctcaacctcccattctcaagtgatcctcctgccccagcctcccaagtagctgggacgtcaggtgtgcgccaccatgcccggctaattgttttgtattttttgtaggtatggggttttgccatgttacctaggcttgtctcaaactcttgaactgaagcaatcctctcacctcagcctcctaaagtgctggaattacaggcatgagccactgcgcctggacagaagattcttaaattcagatttaaatgaagagagtaaatccacaagacctgaggttatggctgcatcagggaaatctcccttaagtggcagaggcagaactcagtaattagagtcattgaccttaaccctgtgttttgcctttgtattattcagatgatgaagaataattccccacctcagaagtttagcttgatagaatagacatgggttagaggaaaaagtgccactactcacatatatacacacacagctcccctgtctccacattactcctttggttggctttatagtgaaaaagaatgaaaaatgaacttaattatattaagcattcattgttattactggttatttcctaggtgctgggctttaggccagtgattgacatatacattgctttatcaatacaaattttcagagacaggtaatacccttcccattttgcagaggaggaaactgagtctcaagaagattatgccagttgttcacattcaccaattaaaaagtggccaacccgagattcaaatgcaagtctgtgtcctactgaacgttgtactgacccgctgtgttcttagtggttaggagccttcataggcaaacagttcctaggaaagtttctgtatgagcctcaacacttaagccactactcagattcacttgccttgtaagtgtcagtttgtccctggtgacctgcaggacaatttacaggacaccagcactcagaggtcatactgcaggtagaatcaacttcataatttgcaggacatggtgcaaaatgaaaatgcagggttcctcattcaaaaatttttaagaaattcaagacactatagcattaaattaagcgtggggcccgtctggagggcgggctctgtgtgatcacataggtccaatgcccatgaagccagctgtaactgcaggaaatgtcaacaaattcagtggatcctgggcaaggctgcctcttgtgttctgcttggggagtggagtgggcttgggaatgtcctctgggcatggctttccctctcctgaggtcttctctgtgtggaaacctaaacactttttttttcttttttttttgaggcggagtttcactcttgttgcccaggctggagtacagttgcgcaatctcggctcactgcaacctccgccttctgggttcaagcaattctcctgcctcagcctcctgagtagctgggattacaggcatgtgccaccacgcctggctaatttttgtatttttggtagagactgggtttctccatattggtcagtctggtctcgaactcccgacctcaggtgatccgcccacctcggcctcccaaagtgctggtattacaggtgtgagctaccccgcgtggcccaacctaaacactttttaacaaggatttagggcgtctcaacttacatcccagttatgtctacgatggggagcacagtgggagggggagatgattgattgtaaaacccagtgaagatgctgtttagaacagtggttctcaaaacctggtctggctttgatgaagttttcacccctctgatataaagaaagaaagaagggtacgacagtgaggtgttttgggtatatgcttatttttatctgtaaagctaaatgtatgtaatataatggccactcctttactctatgattgccttatgattttggtgttgaaatgttctctctgtcctaaagggatactaatgatatccggtggtcatttttgaatcatcttcactagctaaataaaaagttggatgctcttaagacataattccccatgttttagggaatttttttttttttttgagacggagtctagctctgttgcccaggctggagtgcaagcaggggcttgatcttggctcactgcaacctccagttctcactgcagcctcctgggttcaagcgattcttctgtctcagcctcccgagtagcagggacaacaggcatgtgccaccaagccaggctgatttttgtatttttagtggagacaggttttcaccatgttggccaggctggtctcgaactcctgacctcaagtgatcctcctgcctgggcctcccaaagtgctaggattacaagtatgagtcactgtgcccagccagaatattttagggaaaattttactggttcatgaaatacgagtctgagaacctatggactagtaagtgaagaagagcggagtggtatggtggaaagagcccagggctgggggacaccccttagtcttacatggccacgaatcgtggagtcttgggtggcttctttccctttttggggtccttgtctttagctctactctgagggggctggaccagatggttgcctagtcctttccagcttcaatattctctgttaactgattgctagctatcattgctaaataacagggaggatttggattacagacccaatgtgtcctatttattcaagttatggagaaacacagagaagacaattgaagggaatctacaaacaaaataatcctgaaaccaacccaacagctgctcaatagatgttgaaaagagcccatcatcaaatgtactatggtacatcataatggttgggctgtcagtaagaaagttctagcttaaggacgttggcttagtcacattgtatttgccaaacaggcagtgaacatctgtttatataaaaaattttcctcttctttcctttatatttcatcctttaaaaaatttcttaggatacattttgcttggtctagtaagtctacagtgccattttgaagaagaagccttcaaattacttccttaatgcattaaaaatatgataaagtgatttgccaatttgcgtaagtctgagtccctgtcttgcacaataaataattggtaaattttaataaaaatgtacttgtgctgtgattttgtcccattataaacatatcaagcaactattttttttttcaaaaaagctaaatttgctagagggtctcttgtacagctactgtacagtctactttatgcttctggaattgtcaaaacaaacttaactgctgtcaggaactccgatccggtatcactgtcaaaatgttttacaacgattcagccaaatgtttttggaacagctgtgctacaagtcagcatgagtcattttccttctttccttttggcccaatccagtgattcatcatcctgcttttagaatatttgcctatttttaaaaccagtcaaagaaggcagccactgtttaaaagtaaacacaccacacatcaacttggggcagctttgtaagcagcttcgcaagccctgaaacttctggctggtagggatgccagctaaaccagatggcatcaaacagtgaaatacaggcctggctttcagacttggtaggcttcatacatctgtctttggttttcttgtttccgctgctatttcctgcttgggttaatccaacttgatccattctttaacaaaagtcttactttttattttgcttgactctctaaaacatctattgtatgttgatttctacgttaatcaattagacttttatttcaactcaaggagtccaatttgaagctactttatttatctgtaagtttatcagtatggtcacatatgtgtgaggtgacatggcgtgactataaataaggacgtcgatttccacaacgggcctcattaagtctgttgataccaggtgtttgctatttacattactgtagtaaagtaaatggataacttttttttttttaataattaagcaggaaggagtgtgacttcacagggggcaaggtggattaagtctcaggaagccttaagattcattcctggctgtcttctagaattctagaatgtctcagctgctctcatactttacagagtggtttctccttccaacaagtgcctgcttgtctatgattattagggttgggatgcacaagtacagtgtgttcccatttacctttgccaaatcattctggccttggacccaatgagctaaaatggtcgtgatgtctaggttattaaacttgtactgcagtgaatgtaaacgcacttaagaacaaaatcagtttcacaaagcataggttttataatgaagcctacctctaaaggttcagtggtgacaagtgtattatttttgccttttgtccaattctttgcaaacattggggtggatttaacaaggcacagtaattggcagaatttgtcacttctggtctaagtagagcattcaaagggccttgggactgaatctcagttcctctgaagactgtcctctaacctgcagcaaggggcttgggaaatttctcagtttttacttgttctgtgagctaaagttaagtgatatcactgaatctgaggacacccattgtctagcataggagcagatacaaaacagattcaaatttggtgatgcattgtcattattttaaactacttttaaatggaagtattgttatactactcttgactaaaatataccagagactattaagtgatatgacccttgaggggtttggtcaaagtgaataccatgcttgtttaaattatctttttggtgattatcttcgatgctttcaatgccttagatgccagaaatgccttgtgtactgcattttattctggactgtactatcagcacattgggagaggatacttgtttccacattgtatgtggcccatgtcacttcctctagttcaaaaagaacaccaacaagtttttatcaagaaatttggtgatgactatgaaaacataaaaactgttatcttttcttgctttattataatttaaaatagctttggtttttaaattattttttcaccttatattttgcatacatactgtatatgcatagtatgtgtactgtatatgcatatgtgtactgtaaatgtatatatgtataggtactatatatgtatatgtactgtatatgtatgtgtactatatgtataagtgtactgcatatgtagtatatgcactgtatctgtactgtatacatatatgcactgtatatgtatctgcactgtgtatgtgtactgtatgtatgtactgtatatgtatatgtactgtactgcatatatatgtgtacagtatatgtatatgtactgcatatgtatctgtattgtatctgtatgtgtactgtacatatcttattgtatctgtactgtatacatgtgtactgtatatgcatctgtactgtatctctattatatatgtatatgtgtactgtatctgtattgtatatgtatgtgtactgtgtatgtatctgtactgtatgtatatgtgtactgtatatgtatctgtactatacctgtactgtatgtgtgtactgtatatgtatctgtactgtctctattgtatatgtatgtgtatgtgtactgtatgtgtatttgtattgtatatgtatgtgtactgtgtatgtatgtatctgtgctgtatctgtatgtgtactgtatatatctaactgtatctgtactgtatatgtgtactgtataaacctaactgtatctgtactgtatatatctgtactgtatatctgtactgtatctctattatatgtatgtgtatgtgtactgtatctgtattgtatatgtatgtgtactgtgtatgtatctgtactgtatctctattatatattatatatgtttgtgtatgtgcatgtgtactgtatgtgtattgcatatgtatatgtactgtatatgtatctgtactatacctgtactgtatgtatatgtgtactgtatatgtatctgtgctatatctctattatatatgtatgtgtaggtatactgtatgtgtgtctgtattttatatgtatgtactgtatatgtatctgtactgtacctgtactgtatgtatatgtgtactgtatatatacctgtactgtatctctattatatatgtatgtgtaggtatactgtatgtgtactgtatatgtatctgtactgtacctttactgtacatatatgtgtactgtgtatgtactagggtagggattggaaatgagtggccaatggaccttagagccagagagtacctggagataatggaagttctgctttctagcaccaaggctcggtcagcactatgttcttgaagagattgggggtgacttggatattttgacccatattttggtcaggtttcctcaaatgcttcttagaactgcatcttgccatccagcaacagctgcctattgccaaccagtcaacgtaagcatgagttaggaggtctttcgggactctctgggctctggcgctccctaacaaagctgtgaattctgctgcagggtaggagtgctgcctggtgtattggaaagaaacgccccatttgggttgctgcctgcttctcactgtaacccagaatgagtttctggttaactgcctgttagtgtggtttgtggtaggagcagacagcaataccatcacagcttgtggcacttggagtcattcagagcagaacgaatgcttctacttttcactaacatgttctcctgtcccattaaagtccttctggccacctcattagcaccttgttaaagcattttgtttcatatcatattttttggttttggccaatgtaagagtattgaaagacaagcagtccttcttaattggagagctgccagcctggacatttgaggattctgatatttgcttgcaaaattttgttcaggcgacctaagctctccacgcatctgtgtgtacagaaaatgagcaaaattgtcctttacattctgtctgtccccaactgaagtgatgaaatgactgaaacagtgtatactgatggtctaactctgggggagtccaaggactcctacaagaaagagctccatagtgaagaatcattttatttccttgttttagatgatacaccccctgaagactccattcctttggtctttccagaattagaccagcagctacaggtaaggatttttctaaagtctctcttctttcctccttagtgtcataaagtatagcgagctgggcagagagtggcctgactaggggagactgacttggacccagaatgtggggctttgaagtcatcaaggattacatttctagagctccaaagtcaggctgaagccctcatggaatgcccctgtctggttatctggctatggcaccaggacagcaagtgcttatagcataaactggctcctatttttaaggggttctggagcctgggaaaaggacgggtcccttctctacttcgatatggctgtctctaggtcattgcatttttggcttgtctggggttagtgatttagtattaaactctgcagagaagacttaccatgtttgccaagactttggaataatcttcctttctctgttccctgccccttccccagttctctgacaacttttaatggaatataactattttaacttaaaccttctgaaaattgacttgttggacccatgacaaattattttgtatatgtagtttctgagtgatctgttgaaagatattttaatacaccagaattatttgaaaggagctcatttatcacattttaattttctttagattatccatggtgattccaggcaaaaatggctttcagaagaggttctgtctaaaataccaggatactggccttgggccagccattcacttgaatacttaactttgtagtcacatttaggcaagtccaataggggtcttgaatcctgtacacagacatttcttagtcaccacttttttctcctaaatattgattttgaaagcctttaggaggggtttgtaacctccagttcccaacaggccctgacataccctattatcttacacacagcagcttttcccatttgtgggtgtgccttgtgtcctaacgtcatttgagtttggcattcttattcctggacagccctcaacagaggtggaagaagaaccaagaatgagcccttccgcaagccaagatagtgttcctttttgtttgcttctgttcttacctcagtatgcagagcactgtgttaaaaacctggcagcaaccaggtcaggtttgaagagctggtgttctactgccagggtggtctctaaaaaccaactgagggtgactcaggtgtgatctggccgcttggaggagtcctcattctcacctttgtagcagtcctgggcattgtctcagctttccaacagaaagctgctcaacagagcattatcagttatgtaggtattactgaaaattgtataggaggtcggagggttacactgatcaccacacagctgtcaaaagagctctgtcgtcccctaaaatttcctctctagctatcagccatcacgtctccctcttttttctatcctccatgcagggttctcaacccagctctcctggcttctaatttttaaccatagtctctcccttccccactcccacccccaccaatatgtcttcttttcagcatgaagaacaattcagctctccctctacctttccttttttttttttttttgagacagagtctcccttggtcacccaggctggagtgcagtgatgtgatctcggctcactgcaaactccacctcctgggttcaagcgattctcccatctcagcctccctagtagctggaattacaggcatgtgccaccacgcccggataatttttgtatttttagtagagacggggttttgccatgttggccagactggtctcaaactcctgacctcaagtgatccgcccgcctcagcctcccaaagtgctaggattgcaggcgtgagccacggcgcctggcctgcattttcttctggtctgttgacactgcaagtgatagttcttgcttaggttctgttctcacagagaggctgtctatgtgctgctggtggtgtaattgggattgctattgaaagtaatgccattggcccggtgccgtggctcacacctgtaatcccagcactttgggaggctgaggcgggtggataagaccagcctggtcaatatggtgaaaccccatctctactaaaaatacaaaaattagccaggtgtggtggcacacacctatagtcccagctactagggaggctgaggcaggagaatcgcttgaaaccaggaggcggaggttgcagtgagcccaaggttgctgtgagccaagatcgtaccactgcactccagcctgggcaacagagcaagactccgtctcaaaaaaataaaaaagaaagtaatggcaaaaactacaacttcttttgcaccaacctaatagctattttttcccctagtcatattttttcctctttattctatggtcatgtcaaagctattttattatcacggaaatcaggtgaaaataaggagtaaacatattttgaaaataaaacactaaaagcatattcaggctattgttctctcatcaaattatggatcattaattctactttttttgtgttggaacaacattttttcctttgggaactttaatggtcttctctggctcgtggatcattctccacaagactcacagtagctctggcaattatccagataatttttctgttaaagcattgccaggtccatttgaattttatagctttaattccacttgacatatgttagaaattaagtctatttaattattttattccaatgaaactatttcatcttcattgatctttaatgaattaggcagttgagagggtagtttctggctcatggttttgatttttttttcccccttaaagtatgatagtgctttatctctttgtgaatggagagtgtgttaccagcaatacaaccaaacacatttcagtaagtgcttgtttgttgaatgaaggataggagtgagtgttacaaacatttaccagttgtcaaggcttttgggtagggttgcctctgtctagagctgttgcctgttatctttgttctgtactccagggcgtgagtgactaaacagcaagacgatgatggttgggaggagaaatctaatagaagatgacatctaaaagcagatttttatttctatacttagcgtaagcatatacatttaagccttctgttgcaggaagtctctgtattgaaagcagtgaaaatgctttatgtacaaaaggaacaatctattacacagagcaggccatctttatagtcagtctcgtgtgctttcattacacagtaatggctcttggaattttatcgactatcatcatccactatggaagagtaaaagttggattacaaaggcatatgaagtgccttgtggttgcaactatttgcttgagaatgaattgagtcttgattacctctatcagagacttaaacattttcttggtggaaaatagatgatgctaggtattgtcagccccgttctctgcaaaacctcggatttaaatcccaccgaagccactgagtacctattaggcaaggggtgtttccctacatatgatctcatttgatctttgcaataatgagtaagctaactgttttgtctccaccttacagatgagaaacttgaggccaaattttggtctaaatacatttactattcccttctttcccttacgctttttaaggaatatacaggctgcttaaattactttgataggtggaaactttttttgtttgtttctggtttgcaagattgccataatgtagttatagaataaccttgtaaaatctgttctgactttctgatatccattacacatgctttggtagtttataaaatgctgctataaaatagctatttggtagacactcaatcactaatttgacccccaggatttttctgttgttttgccaagaatgtggacaagtttgagcatgtaatttgcagtgcttctattttcacagaagccaaaaaaagccttgtgcaagaatagcagtgaaaaacatttctcttgatgtctctattaatgcaaaatattgagcaagagaccgcaggagaaggtaggtgttaaaatgaatatctctttataatgttcatttgtgggccttgggcctctgtccaggagtaggtggaaggtcagttctatttgtgcagattcctttcttgggactaggtttctaaatttcccatgcccatcagggacagtatttgagtagagctagtgtagatgatatagtcagaagaaaggacgcccaattctatgtccatttctaagaatgaatgaaaaatcactattctctttcttttttatgttttgagacaaagtcttgctctgtcacccaggccagagtgcagtggcatgatcatggctcactgcagcctcgacctccccaagctcaggtgatcctcccaccccagcctcttgagtagctgggaccacaggtgcatgccaccacacctggctaatttttgtattttttgtagagatggggttttgccatgttgcccagattggtctcaaactcctgtgctcaagggatctgcccacctcaggctcccaaaatgctgagattacagatgtgaaccaccacacccagccattacttttcttcaggtctcagcttctttctgtttgacttgtctctctctgttctaaaagatggtggcatcctttcatggtcccagggtttgggtcaagaccaagcctgtcttactgcttaagcatgttatgtttttggaaccatgatttgacttacacatgatccaaaactatgctataacgtggtcttaacttcattggaatgagaaatatgttttattgtcaggtataggacatgataactaataagaatgacaatgaccaaggcatgggcattagcattgggttggcctggatttggatctcagctaaatttgtgatttccagcatgttatttactctcttgaaagctcactttcctcaactgcaaagtggagataatgatatcaatctcacattgttgtgggaattaaatacggtaatgagtagatctagcacagtccttgacaaaataattgctcaattaatgtaaatttcattctctggtgaaattatttattgaatgaaatacttaagaataagtaatttatttttattcatgtaaaatgaaataaaagcatctgcttgaatttttaagttagggatagaagttctgatgccctcttcttttcattaagccaaggtgcttcgagaacaatatgacttttttttttttttaaccaaattgagcaatagcttcaatccctccttaaagtcctcctatctaatctgagatgacagtgacaggtgtctctgtggtacacactgaactaacagagtctgataagtccagaaactgatgtcacctccacaaataaacaatttcgtagcttcagttgtgtaccataatatcctgttatccaagcagcctctccgaaaacttcttttagattttgcatcaatatattgcttgacatctgggaaatgaaaatgatagaaaatgaagaagtctagccttccaggattctgctacactggtctttaacatccatctggaaatgtggttagggtatattctcatagaaagcaccagacgtagctgacattttctctcatacacacattgaaaagtattgtatactgcaatttttctttgattgctgtgtccacacagaaaacatatatagatactttggagcttttcaataatgcctttaattttttgtttgttttgagaagctcagttgtcatttaggtatggcttgttcaaaaagtttgctactcttgtgttctttctccttttgatattgtttatgtcaacagaaatgacttaaatatactttactccagtgtaacatgatgtataagttctgtagtataattgatagtgctcaacttgtactgtaatgtagatactatataaatgtcatttcttaaaatatttaaagttctaagataatagagttcttaaatatcgaaatcagcatggactgtgtttttcctctcagttttaacaaacgatgcttgttaattttaagacattacaatgtaatgtaaatttaaatcagacacccccatctttcccaaaagtaggtaaccctgagaatcaaggaataaatacaaagagtgctcagcgagtgtagaatgtttagcttcctaaatatatctcctgtgtgggaagctgggataggaaaattaaattctgacatttttgaagaggatggggccagtagtattcgcagaagccaaatagaaaacggaaacgcccgagccggctttgctcctagctgagggtggcttggctgggtccttccccatggggtctgttccagggagtggaatccacttcgggaggagcttgctatgaaccggcaagctcaggcagagagcagaacagcaccatagcaccgtgtggctcaagccggcattcttggaaccggaccctgcggtttctctcttacttcatcttgttaaatcggtcctgataattggggcggataccagagatagcagcagctccttcacgctgcactgccatgaaatattaagcccttgcgagctccatcctcaggcggcagcgggaggaggcggagatggaggaaaagtgggcgaggaggaagtatctcctcctgggctgtgacctcacccaagccccagtctgtgtcttggaaacatgtgtttcaaagttggcttgaggcgctgttaggagaaggtgttaatttcacctcctaagaactggctgcgttgtatagtaaaccagatacgatggcagggagtgcatctgaaaagctgctgctgtgaccgcacagaatttgtgctctagtacattagcagtatctttattcttcaatttatcaactcaactatctttggattccttttctttggagtgcaatatttcattctttaagcaggaaggtgggataagtgtatccaaaattggaggatgtagcatcattgtggagaaaataacaagggaatttttttcctcctgatgtgaaaaataattaactatcaacattaagagtttatttatcgtacatccattcccagcatgggcttataactatgaaaatctctctgacaagaatagtcaaaatcaagcaatgagaactgaaatagtgtttcttttattccaagaagttaatagatgttttctcatctagttacccacaggtattcttttaagttattttacagtttttaatttgagcatgtgttacataaacccacgtacagccagttaattcatgagtgccagtgttttacatgtcatgttacttaagcgtactgacactccatttttaaactggaaacctgattcttgaattctaagaatcgatttcctcaggcagaagcttgtgtttgattaatactgttggccatatattgtctcttattttgagggattacctctcaaaaggtaaggtaagagaggattaccctcagtcaggacctgatgatacaacatacatacacacattatatcacaaagcaatgagagttattccatcctacatggaacaacacatcacattattctatagtgccactttttgtattaggtataaaacctgaatatcttaatacttgtattcaccagaattcctgctgggacaagaaccatatatatttaagcaaattctttgatcagtttcctggctggggtaaatggccaatgatgtcaactgccctctaagaacagtagattccgttgaccggagagcactttgatttgctcaacaatgtttggggttaccagtgaatggctcgagattataaaggggtgagaaatttgaagttctctggggagaaatttgggaaagagcaaaagattgagtacaaatggagtcagcctctcctaggtaaccctggtagcactgcttagaagatgggctagagacagcagaaaggtttaatgaaataattttttttgcattgatttttttcttattatgggtaaaaacgcatatggtaaaatttaccatcttaaccatttctaagtgtacagtttggtagtgttaagtatattcacattgttgtgcaaccgatctccagaactttttcatcttgcaaaatagaaagtctgtacccattaaacaacaattccttatttccctcttcctatggcaacaaatgagagaattttacaatgttttggtgggttatgcaatataaccttcctctttacttaaaaaatagaaatctatattgctctttaatgttttcatacaaacttggaacatttgaagtggtgctgagttttatgtcaagttgaaggcttagtttttaggatccagaggctgaagtgacccctggaatctttgtactccctgaaaactggatacaaagtattttaggcttattcttttttgattgtcccttctttatgatgggaagtcttgaaaatattattatgtatagatagcatgatcatgctgctgaaagcacgtgtggatatcttgaaatatgtactacctatcatcacatatgcttagtggcatgatcgctctacctatagataacaacatcttgaatttcccacaattaagaggtgccagtagtaaaaaaagaacaaatgacaacatttcccacttagtaaaaatcattacaggtggtaagctgggggtgaggcagggaaggcctctcccttcttaagaaagttattaatgtacttttcagttttccttttaaattacagcagcaaaagacatatctccctttacacggctgctctctatgttatcttaaagttgtgaatcctttatgtagagttctagaactttttcgctgccacatagttaactgtgctgaattcatggttcaggtacctacacgtactgagctcttgtttcaactgagtatagcctgtgtggtgtttgtaaggacaggatctgatgtgtagagtcttagggccttccaggaggcaaatcctttaacagggcacagatgattcaacagcttggctatggtgcccagaataaattgctttcattccccttactgttatacctggtaagttgccagtgtaacaggtgaaaattgatgagtgggtagcgatttctggggcacagactggaggagccaggagttctgaattcctttggcaatagctttatctcatggggcgagttatactgtagtactactgtgcgttatttttcaattgaatcccgtatagaaagggatgatggttccaacagtctgagtttatgctgtgaatgtgttcatgggcagcagagaaaggtgctacctaatatgattattatgagattttccatgaactgggacataacagatgttccacgtgaaggtaaatttgacctaaatctatttagaattttatttcctttaaacatctctactcagaggcctcatgatacatagggaatgtcatcttatctatcaatcagacagtaaactttattgaatttctattacatcatgggagggatcacagaaataaatatgacacccacagaaatctgtgtccttgaagaatataatgagaggaacaaatagtaaaaaattcattagttctcaatttcctaatataaaattagtgacaatatgaccttgtcagatacatagtttatatatagagagagaccattgtgaagaaaggataagattgaagagcctatttcacaataaactgatatttctcagattttatttacttttttctatatataattgaaaagggtgatttaaaaaaaaactcttaactagtattcctaaaagtagtactttttttttttttttttttttgcaatggagtctcactctgtcacccaggctggagtacagtggcatgatctcggctcactgcaacctccacctcctgggttcaagcgattctcctgcttcagtctcctaagtagctgggactacaggtgggccccgccatgcctggcaaatttttgtatttttagtagagatgggttttcatcacgttgaccaggctggtctcgaatgcctggcctcaagtgatccacctggcctaaaagtagtacttttaatcacgcattgctaaacaagaaattagaaaaataaacttggggaaaactcgttctttaaaaataattcctagaagtagggttttcaccatgttgcggtcagaaaggcttgccacgctggcctttgcttctttcatggatgggagaaaaagagaaacatgaatcttatagggatggtttttttttagggggagggagatccggcctttcttacaggttgcttaatccttgcaagcattatttctggctcagcatctttctttagcccaaatgcatttctcagaagagagcttttcttctctactctgcaagatgagattatacctcctggctacagaaacagaaagcaagggataattgaaacagacaactgaactatttccccaccactgctcttctctaaagcaaagtctaagatttccggggagtacggtagaatcctttggagacttatttttactccatcacaaggcaggtaactgacatgtaatggatttcagggctctggctcaggcctgagatgcccatgaatgacactgggagatgaatgtggagactatctgtccacctctctattttcagtcaaatagaatcagctgaactctgttgaatgttgactgacaatgctgttctcacgttaaaaaaaaaaaagaagaagaaaaaaccttcgtttaaagaacatcagcgagcaaaatggttggtaatttatcctgatgcaaagaaatggactaatttcttcttgttgtttgtgaagcccctgccgccttgtcatgactccgaggaatccatggaggtgttcaaacagcactgccaaatagcagaagaataccatgaggtcaaaaaggaaatcaccctgcttgagcaaaggaagtaagtacctacccccctcactctacatctgagcactgcctactgggcaaggaccaggggcaatgggcaggggacaggctgagtgtgaggatgacagggaggcaagggggttacagcaatgattcaagtggtgctattggagattaagtgctttatggagtagcaaaaggaataccaggaatgcttcctactcaaaacttaattttttaaataagacattttagttcatgaaattaaaaatgccaaaataccacccaaaaccacactatgttttccgtaaatgtgcccagaggctgcagagcactgtggcttggtgtgaattttaatttctgcttaaatgatggcattcccacatcacgtgaagaagccactgggatagctcttcaaaataatgtaaacgttttagttgactgactacattttatagtagggtaagtttttatcttgatagcttttattactattacagttctgctatagggaattatacagttctattaattaaagcattctgattttactcactcataactttttgtttctggatccttctttttaattgcacttgattccgccagtgcctaccccagtgaatcccattcttttatacttgcaaagcttcagagtagacacctttccttcacagtactagctggttgggatttcccatttattaacgagatatcttgattactaggatcttttgattagatctccttttgattacatctcctactaggtggtaagtgccataaaagcactgatagtcaggtgttgtcaccatcagattcctggagcctggtatgatatgtggcacctagaggctgagtaaattattgttgatgtgtgaaacagaacacaaacatattgtgattctttatttcttatatatcacgtgtcaccctaataaaaggaaggggagaagaaataaacatgctaccatgctcagctaattaaaaaatattttgtgggggccgggcgcagtggcccacgcctataatcccagcactttaggaggccgaggctggtagatcacctgaggtcaggatttgagaacagcctggccaacatggtgaaaccctgtctctactaaaaatacaaaaattagccgggtgtggtggcgggcacctgtaatcccagctactcgggaggctgaggcaggagaatcgcttgaacctgggaggcagaggttgcagtgagctgagatcacgtgccactatacttcagcctgggcaacagagtgagactctatctcaaaaaaaacaattttttttttacagatgggatcttgttatcttgcccaggcttgtctcaaacttctgacctcaagcaatcctccaaccttggcctcccaaagtgctggtattacagagtcaatatcagcaataaagggctgctaagatgaattgttaaattaggaaatatgattatatcttatatttataaatacatgaggttggttttccaagggttattaatgattattattttcattaatatagatatgaaatttcataaaggaattaaagattattaataatgtgaccagtattgaagtcaaaggaagatttatataatcaatagcctgtgaataaatgtatcttctggtgtgtgtatgtgaagtgtggtggtataataaaaatacacacacacacaaaatttaatttttacaaaaagcgaatgaaatatattttgtgttgagaagtttgtgaaatccttacaatttttttgagactcccagaatggtggtcggacagtatagcatgatggtggacagtatgggttttggggccagacttctgcaaaacctcagttagtaccttacaaacccttccttccttgcttggtttgccatgcttcaaacataaaattgtatctagacttttggctacaggggattaaaagatgtttattaggaggtcacaaatacaaattttctcttccatgtctgactattttctttttgttctaagagttttgataaagttgcttggaatactcagattgcatgattacacacagttggagtcctacaaaaaatttcatgaaggaattgaggattattaatcatgtgatccatattgaagtcaaagaagatctatatgacgaatagcctgtaaatgtatcttctggtgtgtgtgtgtgaagtgtggtggtatgatagaaaaatcctcagtaattatgtctctatttataaactcttcagactgaaggtactggaggactttgttatttaaattaaatttatgtgtagcttttttttttttggaaatgcaatactcatcccctaaattacatgttctgtaagttttttttatgttgcattaaaaaaaatatggtaggggccagacgcagtgtctcacacctgtaatttcagcactttgggaggccgaggcaggcagatcacctgaggtcaggagttcgagaccagcctggccaacatggcaaaaccctgtctctactaaaaaatacaaaaattagcctggtgtagtggtgggcgcatgtaatcccagctactcgggaggctgaggcaggagaatcgcttgaacccaggaggtgaaggttacagggagctgagatcgtgccattgcactccagcctgggcaacaagagcaaaactctgtctcaaaaaaaaaaaaaaaatgatatggtaggataatgacatgagagtgactcctatctaatgtttgaaacatatccttactgtttacattgaaagcaatgataactctgggtaccactacaacaatattaaaatgaaaaaaggggccaggcgcagaggctcacacctgtaatcccagcactttgggaggaaaggcaggcggatcacctgaggtcaggagtttgagactagcctggccaacatggcaaagccctgtctctactaaaaatacaaaaaaattagtcgggtgtggtagatagcacgtgcctgtaatcgcagctactcaagaggctgagtcatgagaattgcttgaacccagtaggcggaggttgcagtgagccaagatcacgccactgcattccagcctgggtgacggagtgagactgtctcaaaaaaataaaaataaaaaataaaaaaaggaaaagtcaacttctagaagtaacatggctagcaggctagtggaggtattttatacaaccttccagaccacatacaagtgggccggaccccctccttaattacttatatgcctgtgtgtgtttctgcagaactcatcttgtttccttccccaaagtacttgaagtgtctccctaaataattggctagatgtagggccaaggccaaattctttcattatatatatattttctttttcgtaaagtctcaagttcctttttcttcattctcacttctaccatttgggcttgggacttattacttgagatcttggttgatgcaatattgtaactagtttccctgcctagggtttcttgttgctagaaaatgacagccagttcttggcatagatttcaagacctccctggggatgccttggaacctctgtagaacttccaatctcatccctcaacttcagctacattggcctcctcacttctcccggggcaggaggtgggtcctccagtcactgagcccctgttcacaccaagctcttggcctaacaggcccctttcttccttttttttttttttttttttgagacaaagtcttgccctgtcacccaggctggagtgcagtgatgcaatcatagctcactgcagcctcaaccccctgagctcaagcaactctcccacctcagcctcttgaatagctgggacgacaggtgcatgccagcatgcccagttaattaaaaaaatttttttaaagagatggcatcttgctatgttgcccaggctggtctcaaactcctgacctacagcaatccttccacgtcagccgcccaaagtgctggtattacagagtcaatatcagcaataaaggactgctaggaggaaaattgctcgaactcgggaggtggaggttgcagtgagcctagatcacaccattgcactccagcccgggtgacagtgcgagactccatttaaaaaaaaaaaacaaactgctaggatacattgttaaattgggaaatatggtaatatcttatatttataaatacatgagcttggttttccaaggattgttaatgatcgttattttcattaagactttactgaagtggaaattcattttgcaacatgtcttttcccaaacagtctttattttcaagcaagatatattgggccaagtgaatttgacccaagtagttagctctccattttttgatgattctgttgagaatttctttctcattatttcataaagtgtagctgattatgttgcctctagcttggctggcgtaagctagatgcaaagagagacgctaactaaggtattttaaaagacagtttttctttattggagtcgttcagacactgcttaaggtttgaactccaaactgaacttctctctcatctccagaggaggtctccctggatcaagtttgggagaatttgtcttaagaggcgtgatgagaagagttgctgaaactgttattttaaatcatatctgttggatggagaaagagagtcaaacattttctaggattataaactcagcattggctgaatccaatttaaagaatcgcttctggcttatgaccaatgatgtacgagaggtttgttatatttttactgattttttttttcttctccgtgtgaaaaaggtgggaaggactttcttgaaagctttgaaaaattaccaagaattctgatatctttaaagaactcctgctatcatttttatctaattctttctaggccttttgcatgtgaatagacattttaatataattgcatatacagtaacgtggaatgtataacatgattttttccgtaaatattataagcatttttctacaacatacctagctttttgtgtatgtaatatgaaagtcattgaaatgagatatagacattttatggcttttgaaatctatcaccaaatttagaaaaaataaaataaaaaaatgaaatctattaccaaattgtttgacagaaatttttaaaagtatattattaagctacaatcaactgtaaagtttgctttgttccagataaagcattttatctcatccagtagagaaaccacttatttatttttttggtatgaaatattgtattgggtactttggtgtttagaagattaactgaaatgtcagaaaaatagacagactcttagaaaagtcagattgaagaatgttttatttattcattttaatttttattttttaatttcaatatgtttttggggcacaggtggtgcttggttacatgaataagttctttagtgatgatttctgagattttggtacacctgtcacccaagcagggtacactgtacacaatgtatattcttttattcctcactcctctcccaccctttcccgagtccccaaagtccattgtattatccttatgtctttgcatcctcatgttatatatatttttataaacaattttattttattttatttttctgagacagtcttgctcagtctcccaggctgcagtgcagcagtgcgatcttggctcactgcaacctctgcctcccaggttcaagcgatcctcctacctcagctccccgagtagctgggattacaggtgtgtgccaccactctgggctaattgttatatttttagtagagtcagggtttcaccatgttggccaggctggtctcaaactcctggcctcaagtgatcgggctgctaaagtgctgggattacaggcatgagccatgcgcctggccagttttatttgtttttaattgacatgtagtaattgtacttagttatggggtctagtgtaatgttttcatacatggacacattgtgtaatgatcaaatcagtgtaattagcgtattcatctcctcaaacatttgtcatatctttgtggtgagaacattcaaaatcctctcttttagctattttgaagtgtacatcattgttaactacagtcaccctactgtgcaggagaacaccagaagttattcctcctgtctaactgtaactatgtactcactgaataacccctccccatacccctcttcctaccaccctccccaacctctggtaatcactattctactctctacatcaatgagatcaacttttttagattccacataggagcgtgattgtgtggtctttgtccttctgtgcctcacttatttcatttaacatcatgtcctccaggttcatccatgttgttgcaaatgacaggatttcattttttaaaatggctgagtagtattccattgtatagatatatcacattaaaaaatctattcttctgctgatggacacttggacacgtaggttgatcctataccctggctattgcaattcggtggttttcagtatattcacagagttgtgcaaccatcaccaacttcacatttccttcaccccagaaataaatctggcactctttggcagttacgccccactgacccttgacttctggactttggcaaccaataatctactttctgtctctatggatttgcttattttggacatttcatacaaatggaatcatataatatgtaatcttttgtgattggcttttttcacttagtataatgtttttaaggttcatccactttgtatcatgcatcagtacttcattctttttattgctgaataatattccattgtatgaatatataatattttatcctttcataggctaatggacatttaatcggttgtttgcacttcttggctattgtgaataacgctgctataaacatttgtgtacaatttttgaggtagacctatgttttcaattctcttgagtaggttcctagcagtagaattgttggctcatattataactcaatgtgtaaccttttgaggaactgccagattgttttcaaacgggttgacattttatattcttgccagcagtgtatcaaggttccaatttttccacatctttgccaacacttcttgtgccttttagattctagccatctgtagtgggtgtgaaacaatatgtcattgtggttttgatttacagttctctgatggctaatgatgttacacaggttctcctgtgcttcattggccatttctatcttttcttggagaaatatctcaaagatcttttgcccattttttaatttggttgtctttttgtttctgaggtgaaaaatgttacataattttagtgtgttcaggcaaaacatcagaaaggggttttcatatgaggctatcaaaatcaatgtgagacttatattgtcatgtctttttaaaatgtataaaatgatgattggggagtaacatctcatctaggggaacatatcaggatggggcaaaagggtgcatatgtaatttgcaaaggcataaattaaaattagtgcaattttgatttgtttttagtcatatttattctgagatttctaataacaggagattttaagtttttttttttatgtttaaccagaaggatttatttctttaggatattcccaaagggagaggcttttaaactgtgttctgaggagtctctcacagattcgggagggagagggtgtcaggcaggggactgtaccaagatcaaccagagaaggaccaattttttttttttttttttttttttgagatagagtcttgctctgtcacccaggctggaatgcagtggcgcgatctcggctcactgcaagctccatctccccggttcatgccattctcctgcttcagcctcccacgtagctgggactacaggcgcccgccaccatacccagctaattttttgtatttttagtagagatggggtttcgccatgttagccaggatggtcttgatctcctgacctcgtggtccgcccacctggcctcccaaagtgctgggattacagttgtgaaccaccacgcccggcagagaaggaccaattttatcccttttatttgcatcccttcagggtatgactttctttgcaaaaggattccacagcagggtaacactgaaaaccaaacctcacttttatatacctaagatatttttcttaaatatttactcagcctccagaaattacattttcattaacataaatacacagtaaatggagacatttctccacaagtgtttgcaggatatatagtaatgtggggaaaagttctatcttctctttcctatgatgtctgatatgagtaagatgccttctgggtaagatatgagatttgagttcattttccagctgtggagatgcacttcccaagactgacttggctagcaagaatagaagacggtgcctggcttgtaacagactttcaataaatacttgctgagcaaatgagtagaagagcaaaggcctgcctcagttctttactttgtttatggagacagagatgtagccaaaggtattctttcattttagtacttaggtttttgtgaaatttcagtatcccagatgccatcaggctgtgagtttaagctgttaatgccccaatcacaatgatttgggtattttacaccacataattaggtgcagcccagtcatttaatgggaatttcattcccaagtatttctacacctaattgtctgcccgaaactatattaaatttatgcctagtgttccattattggaacactaaatgtgggagttatttatatcctactgctcaaggtcattgccaagatctgatttttcaaattcaaaaaattgcaacctcaggcattaagtgggttaaaagggacagcatatttactcttctcagtgagagctcttttaagtaggtttcccttgctgaggaaagaggctcaaatccaatctctggggtagcagagtgaagaaaccttttgctgttcactttcttcctgtcccaggattaattcttgtcaggttgattgatagtgggaatctccacttcctttaggtggtggttcttaatcaggaaattctccacacctgccccaccctacattggcaatacttaagagacatttttggttggtgagtgtaggtttgctattgacatctagtgagtgaggccaaggttgctgctagacttcctacaacgccaatgtatagacagtgcccaacgacaaagaattgcctggcccacaatgtcagttgtaccaaggatgagaaatcctgctttggagcaagtctgacttcctcctgcacgggtgcagtgttgccctttgcttcccaatagatattagtacatttcttcatgcattaagcatttgtacagcttcaacaacatagtctagactgagcattggaaatctcagttcagtatcatttattattcctccacctggataaaatgaaggtagactttgacatcctttctgtcatcttgaggcattgactccttctgtcctgcgtatgaatgcttttactcagacataagtctctcaagatccaccaacaatacagtctaaatccctatttaaaagtaaaattctccctatgataaaggtattttattatattatttccccaaattctttagctcactggggccaaactgtctagaattttgcctttcccaaataaaagtccctagttaactttgaaagggccaagatcccttgtagtggtctcctcagcacagagaaatatttattccagtgatggatccatgtctcaaactcctgcaatgtaaagaatctccttaattttggaattaatttccataaagtttgaaagttttcttaaccaattgacttggactttcccttcccctatttgtttagtaactaaaaacctttccaggcatgtggcttaggatggaggcaacagatgagctatggtggactccaaagttatgaccttttaggctattgaatggcgtcatgtggaaagctatgttacagattcatgactgcagaaataagatctctctaactgtggtcttctacccccatattacattacactgaaggaaacgatacaaatagaaccaataaatcaaaggcagaaccacattctagcctataatacatattgatttgttcttcagatcatctatttataagattgtttttgtagcttgatgtgccaaggtttaattatgaattgctaatggatgagcataaatatgtctatataaataggtcctggacaggaaacaatagacattttgacagttttcattggatgtctgtataattacttatcaaatacatgacactaatttagaaacatatccgctgagtcttctgggttccagtaaagaagaaattattattgactttctccaatgcaagatcagactagataatttagactattctttcaaattgtaaaaatctatgattttgtgattttttatctctgacaatcaaaattaatgacagatagcttcaggagttttacatgaggttagatatggagccagggaaatagccattgttatccccattaccaccacctcccagactgtgatttgaaagtaaagtccacctaaatcatttatatgacacaagtaatttgaagagaaaaatagaacaggaatagatgatctgtttgatgcataggggatttaaagcatgtctctctctctttctcttttttttttctttttttttggaatggagtctcactctgtcgcccaggcaggagtgcagtgatgtgatctcggctcactgcagctccacctcccaggttccagcgattctcctgcctcagcctcccgagtagctgggattacaggcacacaccaccatgcctcgctaatttttgtattttcggtagatacagggtttcaccatgttggccaggctggtctcaaactcctgacctcaagtgatctgcccgcctcggcctctcaaagtgctggaattacaggtgtgagcctctgtgcctgcctcttttttttttttttttaatttatataggctttactcattaatgtttaaaaataattacatgaggaattttactaattaatatttaattattgacatttactacctaagctatgcttagggacacaaaactctaaacatttaatcagaagataggcttgatttctggctcactcttattagctgtgtgactttttcctttaaatggagcactttcagtttctatttcctcatttttaaaacataaattactgtatctctgagctacctttttcttcaattatttattcagtaagtatttattgtgagcctattctattctaaacagcatggaagatccaaaaatcagtaacagcccaaaggaactttgtttatatgcgtatcagtgatgtaccttatcttccagttttggacactttctaacatctggttttgctcagtggacaccaaagtgggtatccaaggcaggccattgggtgcaggaagaaaatactagaacttttatccttatttactccttgtctttttttcaggataactgcattttgatagtttcaaacttagagaaaaattgcaaaagtagtatagagaactcccaaccgggcgtggtggttcacgcctgtaatcccagcactttgggaggctgaggcgggaggatcacctgaggtcaggaccagcttagtcaacatggtgaaaccccatctctactaaaaatacaaaaattagccaagtgtggcgcacacacctgtagtcccagctactcgcgaggctgaggcaggagaatcgcttgatcccaggaggcagaggttgaagtgagccgacatcacgccaccgcactccagtctgggtgacagagtgagactccatctcaaaaaaaaaaaaaaaaaaaaaaacaacactcccatatatcctttactggattcaccagttactaaactttccccagttgtgccttattcttcctcccacgacagtactggggttttctttctctcatacacacacatatacatatatacatatgtgtatgtatatatgtgtgtaaatacatgtatgtatacgtatgcatatatgtgtgtcatcatgctccacattgccctaaacacttcagtaagtatagtctaaaacaataacattctctcatttaaccatggtataataattaaaatcaagaaatttagcattgatatattattattatttaattcacagtccatattcaaattgcatcaatttcccaataatgttcttcaaaactatttttttttcagttcagaatagcacattgcctgtgttgtcattttcttttttttttttttttttttggtttctttaaatacggaggagttcttaacatttttaaagatacaggttaacaattttgtagaatttccctgaatttgatttggtctgtatgattagatatagagtgtacatttttggcaggaataccacagaaatgatgtgtgtttcacagtgcatgtgatgtctatttatctcatgactagcagtgtcaactttggtcatttggtgaaagtggccttccagttttcatcacacatttcccttttcaattaagtaatttgtaggagacactgaggttatgtaaatattttgttccttatcagactttcaccccccaggtttagcatccggtcttatcctgttacatatccatatttgggtatgctttataatgtatgtaatatattggcaggtatataatttatgaatgaatatgcagacatacgtagaagtagtttgggtttgtgttcaattttttttaaccaatagtattatataataaaacatgtttggagacctaattgaatgagatggtcaggctgttttctagctctggattattgaaacattacaggttgtgttttgatgagcaacccccccctccccccgccccttgttcccagtggccacaggcttatttccaatataaacttgaatattattgcttttcaggaatatatgtattttcctttcttcttttcatattatgtagtgtcagatcagtatctgatcagtggaagaaggaagaggagaggcttttagaaatgtagccaactgtagtgatgaaagaatgtaaggaagatagtatttgcatgtattttatgctaaagcaatgttattactactttaaaacaggggttcaaaactgtttcctaggaacacaactgtaaaacatcaggagcttttcagggtagggggaacctaggaggagaagccttgggactgagactggtggcagtgtgtcctaagctttggtcatttgggtacaacttctgtgaatgatcatgaagtaagttccagatacttccacatctacattattattgactcaaactttttttgtaagtcatctttatgtagatcttcttttaattagcctccttttagggcacaagatctttgaaatcatatgttagatgcgttggtttatatttaaaaatacacattaatttaattcaaaagtctaatgaagctttcagtacaacctacaatcatctaatgctaacaccagcagtacaaagccttccctttggaaagctcatctagaaaactatgtatctgaaggtcatttaccaactgttttttgccctacagaggaggaagaaatgtaaggcaaaggagaattcagttagattttgtctaggttaggattacctgacctccatgatggagacagacctggtatcctttgggttatcatgtttattaaatctacacatggactgaagatctttagctcattatttctttccttttttgagacaggatctcactcttttgcccaggctggagtgcagtggcacaatcatagctcactgcagcctcaacctcccacgctcaagtgatcctcctgccacagcctcccgagtagctggaactgcagttgtcagccatcatacccagctaatttcccaattttttgtagagatgttgtctcgctatgttgccgaggatggtctcaaactcctggactcaagagatatttgcctaggtatcccaaaatgctgggattacagacatgaaccactgtgcccaacctttagctccttataatgtgtatttaaatcaatgaattatttacaactattaactaagaactaagtttctttaaagtgttttcattacaattttcctacagtagcttcagcctgcttcctcaattctggagtcacgtcagcatcaaatgtggacacagttttgttaatttgggctgcaatatatatgtaaggattagggaaagacataggaggtaatatctacaaggacagagttgggattctgtagttcaaagaagtctattggagatttgttcaactcagatgtaggaaacaaaggaagataacaactgaatttgggggacaaagactcagccaagagaaaactatagttgtcctctctacaagacaataggcagcatcttaaattatgaaaaattttacacagatatttttctaaattatttttacaattttctgtatttttaaaatgatcatgtttttgactactaaagaacctatgggacttttggtgtatggttagtattttggaagtgtctagtcgaggtgctagaataaagggatataaaatttgcaaagctggacaaataaaagtcattggaggcaagtagagatgggaaaaaattcagaacagcagaatgaatcattctacttccatcatgctattactgaataatttaatttgcttgcattgaattctgtgcttcttcctgccctttaccccgaatcttcaggaaggagctcattgccaagttagatcaggcagaaaaggagaaggtggatgctgctgagctggttcgggaattcgaggctctgacggaggagaatcggacgttgaggttggcccagtctcaatgtgtggaacaactggagaaacttcgaatacagtatcagaagaggcagggctcgtcctaactttaaatttttcagtgtgagcatacgaggctgatgactgccctgtgctggccaaaagatttttattttaaatgaatagtgagtcagatctattgcttctctgtattacccacatgacaactgtctataatgagtttactgcttgccagcttctagcttgagagaagggatattttaaatgagatcattaacgtgaaactattactagtatatgtttttggagatcagaattcttttccaaagatatatgtttttttcttttttaggaagatatgatcatgctgtacaacagggtagaaaatgataaaaatagactattgactgacccagctaagaatcgtgggctgagcagagttaaaccatgggacaaacccataacatgttcaccatagtttcacgtatgtgtatttttaaatttcatgcctttaatatttcaaatatgctcaaatttaaactgtcagaaacttctgtgcatgtatttatatttgccagagtataaacttttatactctgatttttatccttcaatgattgattatactaagaataaatggtcacatatcctaaaagcttcttcatgaaattattagcagaaaccatgtttgtaaccaaagcacatttgccaatgctaactggctgttgtaataataaacagataaggctgcatttgcttcatgccatgtgacctcacagtaaacatctctgcctttgcctgtgtgtgttctgggggaggggggacatggaaaaatattgtttggacattacttgggtgagtgcccatgaaaacatcagtgaacttgtaactattgttttgttttggatttaaggagatgttttagatcagtaacagctaataggaatatgcgagtaaattcagaattgaaacaatttctccttgttctacctatcaccacattttctcaaattgaactctttgttatatgtccatttctattcatgtaacttctttttcattaaacatggatcaaaactgacagtttctagtttgctcctttcttaacctcctttgtgctagatgttgcgatgacctagccctagtcggaaactgattcttagctgtatttgcatgtgccaaaaaaaaagaagtgaagtcccctttctttctttttctctttctttctttcttccttcttttctttctttccctttctttctttctttccctttctttctttctctctctctctctttctctctctctctctctctttctctctctctctctctctcctctctctctctctctcttctttctttctttttttctttctttttttttttttttgacagagccttgctccgtcacccaggctggagtgctgtggcaagatctcagctcactgcaaccactgcctcctgagttcaagtgattctcctgcctcagcctcccaattagctgggattacgggcgcccatcaccacatctggctaatttttgtatttttagtggagatgggatttcaccatgttggccaggctggtctggaactcctgaccttgggtgatctgcccacctcggcctcccaaagtgctgggactccaggcgtgggccaccacacctggcctgaagtcccatttcttagaaagactgtgatttcacatataaacaactcagaacttcaatattgaatgtgatgcatttgtatcttgagatatttgccccaaaaacagaaaaaaaggaataattcattaaaacaagatgacctcagataaatgagtggttttcaaatgggcgtgattttgctcccaggggacctttgacaatgtctggaaatagtttttgttgccacagctagcatgagggagtcctacttgtatctagaggactgagtccaggatactgctaaccatcctgcccagaacagtgcctgcaacagagttgtccacctcagtgtgacaatagcactgagattgatgtgccctgggatagacaagtctctggacagtttgggcaaatgtgaagggaggcatggtgcagggccacaggtttttttgccacgtgatgcaaaagagcataagagctgggaggcccttatgcatgttgatcttcaatttcctcatttgtgaaatgaagctttttgatagacctcaaagttttcatgttatgtgagcctattcacccttaagctgctttaacatttgactgaaggtgaaagtctctactgttctggaagaaccttctgtttcagtaacccacctcctctttttagtataaggctaataaacaccagtataaaggaggaattgttcactaagttaatacaaatacaaagttagcagaatgggaggaagaaaggtaagttactcatctttaaatataaagattagtttttggacactgctcatctgaagacagttgcatatatttacaaaattcaagcagtcacagtcccttctagaaaatgggaagccgggaaatacggttccaaaatctctttgctttaccagaatgaaaataatttaacaaagtaaaagtatttgaacacaactattattacattaaggagtcactgatggttttcttatctttgctggtgttagcttgactttttactatttccaaaagttatatatttgtgactcaaaagcaagcatttccctaggtgtatatgttgtaagaagatttttgttaattagaacatgaaaatattatctacttttatagcatgtcagagaaatcttatgtgagaaggtggaatttcttatattatctgtctcttttttttcaataatttgacaaatttccaccaatcttatttaccactgcatattatctatataatgaccatttaagaattttctatcttcaaatatatttgcaatattcttgctattagcaataatgacaatattatagagcataaaaacgagcacagaagtattatggtgttattagtactatagcattagggtgagggtgcttgctttagagatagaattaaaataaaatgtaactcacattatattctttaattgctctactaaagaatttgtcatttatgggccatttattttgtgtagacatgaaaagaatgtggttacacctagctagaaaatgtataacctttcatatgggcagggcatgtttctctttctcatcctggtacctgagtttgagtgtatgattaactcagtgcaagtaaggagctaaataaaagagatctggaactgaaattcaattcaacaaaaatttattatacacttagctggtgcagggccgagcaacagcaatagaagatgcaaaaatgacaaagataatgtggtcctagcacatttagggatggattgcactagattgccctagagaatagaggcacagggaactgatacaaggctaatagaaaagcatgtgcaaggcaagtctaagagcagcagcatttgaaagagagtaacagactaagagggatgggaaagacataatgggaggtagactccacagggcttcagatggattgcatgtgtgattgaggcaaggaagaggaagagaaagaacatttaatgacctccttcagtgccagactatactaggtgctttgtataggctgtattattttaaacacctgagagacagctgtgattgtcccttttctccaatgttgtataatttgtagaaagttctcagagctgggattcaagtgcaaagtttcattcactcattaattcatatagtcaatatttattgaatgtccacgctctgccaggcatcctggaagataccagggacacaaaagtgaacactagaaacaagggttctattgggttctcaaggaacccttagtctagtaagggaggtagatatttatctaaatacccaaatgggatagttttaaaacatatcaaaaaatttccataagaggtagagcctaatttctctcccatttagtgtgggttggacttaaagacatatttttaacaaatagagtcaagcagcagtgacaacatctgacttctaagtctaggtcatgaaagacattggagcttccttcccacctgctgtctcttggatcacttgccctggggtgagccagctgccacggagaagcccacaggtaaggaactgacaccttcggccaacagccacgtaagtgaacttggaagcagatctgccagctccaggcaagacttcaaacgctgcagtctggctgacatcttgagtgcagcctcatgaaagtctctgagtcagaaccacccagctgaactgcccctggttcccgattctcaggaactttgaggcaataatactggttttaagctgctaagtttggggtgatttgttttgcagcaataagtaatgaagataaccacaaaaatgagataagtgacaaaatgtagttgatgaatgcaccttaaaaacagaatcttgccaggtgcggtggctcacgcctgtaatcccagcagtttgggaggctgaggcgggtggatcacctgaggtcaggagttcaagaccagcctggccaacatggtgaaaccctgtctctactaaatatacaaaaattagccgggcgtggtgttgggcacctgtaatcccagctactcgggaggctgaggcaggagaatcggttgaatccgggaggcagagtttgcagtgagtttgcactccagcctgggcaacaagagtgaaactttgtctcaaacaaacaaacaaacacggaatcttactgagatagggagtctgggatggctgcttagtgtagtgtctactgagctaagatctaatggatgagtaagaactaaagaggcaaagaaggcaggtggaggaagacaacctagacagagtgaaaacacatgcaaaggccctgtgacatgctcaaagacctgaagaaaggccaggatggctgagcatgaaggggtagggagaatatagtattaggtagtatagtataaggtaaggttgtagaataggtcaagaacttgaagatcacattaagaatgttggcctaaaagcaaagagaagccattggagaattttaagcatattacaggggtaacatgttttttgctagaatagcatgttttttaagagttttctggctgggtacagtggctcacacctgtaatcccagcacttcatgaggccaaggtgggcggatcacctgaggtcaggagttcgagaacagcctggccaatgtggtgaaacctcatctctactaaaaaaaaaaaaaaaaaaaaatgtagcagggcatggtggcgtgcctgtaatcccagctacttgggagactgagatgggagaatcacttgaacccagaaggtggaggttgcagtgagccgagatcacgccactgcactccagcctgggtgcgacagagtgagactcagtctcaaaaaaaaaaaagagttttctaagttacctaacttaagttgcttagagtgctatatagggttatttatactatacatatttaggtagacagatagtagaaagatgatagggttctttagatggggttgttatacacattttacttgcgatgtcctctgtggttgttattattttgtattacaagaagggaaacccctcagattgcaccctctctctcttactttcccagaggaagagcggaacagttctcaatggcaaatggaagttgcagtgaagcagcacccagagccagtgtcaggctcccgagagagcgctgcaccgctgcatgtggtttctggtgctctacatgttcggagaaacttatctggtagtgagctatagaaacaatccctgcaagcgtcgtctttataaggtcattttaatgactatttttctcctcaggaaataggtaagccctcagcagtatcaaatagcctggcagaataaaaggctgattgagtcggcctccgctgtgaccattaacatatttaatttggtgacaccaaataatcctgccttttatgaaaatgtctacaatctgtcttgttttttaccactttagagttgacaaactccatgttggaacagagtattcttaaacagaacccttaaaaccatatttttcacctctctgtttttatctatctatctatctatctatctatctatctatctatctatctatctattgagacagggtcttgctctgtcacccaggctggagtgcagtcgtgtgatcacggttctctgcagcctcgatctcctgggctctagctatcctcccaactagctcagattacaggaatgcaccatgaggcccagttattttaaaaaatattttgtagagatgagggtctctcttgttggcccaggctggtcttgaactcctgggctcaagcaatcctcctgccttatccttcgaaagtgctggaattacaggcgtgagccaccacacctggtctattattattattttattattattattatttttaatttgagatggagatggagtctctctctattgcccaggctggattgcactggtgcgttctcagctcactgcaacctccccctcccgggttcaagcaattctcctgtctcagcctcctgagtagctgggattacagacatataccaccatgcccagttagttttttgtatttttagtagagacggggtttctccatgttggtcaggctggtctcgaactcccgacctcaggtgatccgcctgcctcggcctcccaaagtgctgggattacaggtgtgagccactgtgcccagcccctcttatttttaaagaatgagaataatctgagctgggaatgcagctcacatcaaacatgaacatagaaagggaaatgcacaaagtgagagatgaaatcactcacaaagctgatagcatgaacttctagattccctgaatacccttccagttttaatttcctatgttttaattcactgggaatatattccttaatttctcataattacaaacaaatgctccctagaagaaaaatttatgcttaagagagtattcggttccagtgttaaaatcatatcctttcatttttctctgaaactttgaaaatgtctctgttcagtcctttgtgtgtacttctcaggcagtactgaagacagagagataaaaggggcggtgctgacacacgtagatgactggggctctgacaatgaccgtgagctgatgacctgagtcacacaaactggaaaacaaagtttttccctaaggagttggacttttaaaaactttttattggctgcttttggattaaggtgtttaggaccagcattatgagcagaaggactcagtgtgtatgaagaagaaaccaagtttttctacagcagaagaggaggaatttgcctttgcaaaatgttatactgttttatctgtcgctgaacgtgtctgggcagtggctgttctcccaggtctgagtcctgaaaagggaaagagaaagagattgtaggacacggtgaaatgatacacgaaacagcgtttccccagcttcttatttgcctgtacatttctcataaatggagtaaatgctgaacaagctgactttctcccatcattcctgtaaataaggatatgactcacagaccttgcaatctctaaaatgccatagctactacagtgatttgattatttaaaaatagctggggaaaaaaacagcaagaaattggtcctgggtaagttaggatgaattcttttctgtttgtttttgtttatcatttaaattgttattgtatctcaccctaagtattctgacaacatctagtttgccaaacaaatcttagggatttatgagttctggaaactaacaatatgaacgtgctggtcagatctcagatcccaggcaaataaacccaaaaaacaaaaaacaaaagacaacaagacacaaggttcaccatggagtcactgtgatctgcgggcaactatggatttggttatatgatctccttttctataaagtggagagagataagtgttgacatcacttaaatacgctgagccccacccccaaataacacaaatgctggtaacaacaataatttatattaagcctactgaacggcttttgttgatctttaactagcctatctagaaatgggaaacgagtgacctctattattactcaagtactaaaactccccaagtaggactgtttgtcaaaactaggagtgagtttgagattcaggattaaggttcaagtagggaatctccatttaccctgcatctcagtcttacactgtattatcagggtcttgggaggaaagagaagcacacttaagaaggcatgataaaaagagaaagtaatgaagggattattataaagttagaggaagagttaagggaaataagaagggttgatgaggtccttggggtggctgcttcagggaagtcttctctaggctttcaagggcaagcaaaggaccactgacattcctcacaaacttgcactttggtgagggagccgggccacagctgacctagggcttagcagaaaatctctctctccttctgtccttccatcctctcctggtggctgccactggccaagcccaactacaaacgacagaacaagggagcttggttgctggggtccatcatacagccagtctttcagggtgcagagcagggtgaatgggtgaagagtggatctgcaggggaacatggatagtgtcgggcacagaccactgacaaacgaaagagatggaaatgcttcagaaaagaaagcaggatggccaggtcggtggtttttttttttgtgtgtgtgtggagatggagtcttgctctgtcacccaggcttgaatgcaatggcgcagtgttggctcactgcaacctccgcctcctgggttcaagcaattctcctgcctcagcctctctagtagctgggattacaggcgtgcaccatcacgcccagctaattttttgtatttttttctagcagagacagggtttcaccatgttggccaggctggtcttgaactcctgacctcagatgatccacccgcctcagcctcccaaagtgctgggattacaggcgtgagccacctcacccggccaggcctgtgattttaatcatgggatcttgcctagtggtaaagccccattaaatgtctgaaaatctgaatcagaaggatcagcaactgttcttccctaggaatggatcaaaggtaggtcctatggatacggcttgtctgtccccaccaaaactcatgttgaaatttgatcacgaatatggtggtgttgagaggtggggtctagtgggaggtgtttgggccaggagcatggccttatgaataatgcagttttccaggtagtgagttcttgctttcatgagactgcattagttcttgtgggaatggattagttccctaaagtgtgagttattataaagcaaagttcctgttcctgtttgatcctctctcttctcacttgtctgcttcccctttgacctactctgccctgcaatgttatgacacagaagaatgccctcaccagaagccatggccatacttttgaacttctcaccctgcagaaccgtggactagatacacttctttcctttgtaaattacccagtctcatgtattctgttatagcaagacaaaatggactaagacagtagggttgccagggaaaagacaggcatccagttaaaattgaatttcagaaattagataaactttttttttcagtataagtatatcccaaatattgcatgggaggtacttaaagagttgttgttcatttgaaattcaattttaactgggcatcccgtatttttataaatatggtaattctaagggcacttccttctcactaaagatactagaattagaatttgaatatggtatagcattcctgaaaccttgttctttcaacaccaatttttgaaatgttaagtatttccaaacaaatgaacaaaaaaacaagctaaacactgtttcatagtcaaagaagttaaaaaaacagtggattaaaataaagttaaatagttctcacagctttaggatttctcctgggacttaatgctaacatgcattgtgacaacaatgatagtgtttttccttgctttatttgaaaaccatcacaacaaagaaacagcccaatattcttctgtttcagtgtgaccataggtttccattgaaatgcagtttaaattttaaaaagtcattttggtgtctattatgttaaagtaaaattttactattaccaaagtaaaattttactattacctcaatcttgctttaagactaaatttatatttataaagatgttttaaagctctctataaatgtttgcaaagtaatagcattgtatttaataagctattaaattgttcacttgatactggttttgctaagcttaatatgaagaatcaattaaaactaaattatcatctaagcagggacaatcctagattattcagagagaaaaatgaggataaaaacattagctctgtctgcttctcaaggttatttttggaaagaaatgaagtaatgttgtgaaaggctgtgcaaatattactgcaaggatacaaattaccctccctgtagagtggatgggattttcacaattttctccctttctggtcataggtattttatctaatttgttgtccagtctgtaattctaccctgttgtgtgcagtgggagtgaaagggaggtacatgaattaggattagaattgcttgtgaaggacagaaacctgccaaataacggtgccttaaacaaggtggaagtttccttttctctcatgcaaaagactgggatgtgtagtcctgggctgaaatagaggctcttctccatcaaatctccaaggcttcaaacttctttgccattattgagcaatgtttctcaatctcatggtccaagatggcggtatatatattccaggcaaccagagaaggaaggaacaaagaagtggctgaggcagtggggtggctggctgtcctggaagctggcacaagatgctttcagttacatgcttgaaatggttaattttatgtatcaagttgactgggccacaggatgcccagatatttggtcaaccagtattctgcatatgtctgtgagagtatttttggatgcggataacgattgaatcggcagactgaaaaaagcatattttccatcctaatgtgggtgggcctcatccaatctactaaagacctgaagagaacaaaaggttgaccctcctacaagtaagagagaactcctcctgcctgactgccttgaccctgagacatgggctcttttttgccttcagtctcaaactaaaatattggtctcttcctggatcttgagcctgccagcctttggattggaactacaccatggctcttctgggcctcctgcttgctggctgcagattttggtacctgtcagccttcataatctcatgagtcaattccttattgtatattgatatctatctatctatctatctatctatctatctatctatctatcattgataacctctctatctattggttctgtttctctggacaatgctgactaatacaatcctattgtctggaacttagtatgcaagaaagagagtgagtatatggggtgaaatgtataggagtggagctaaaagactttgctgcaggagaggagttcaagtcattgagggcagttatgagtcagcaataatgttggtgcagtattttatttcaggagtcaattaaaagtattgtcattttagcagtttatgtcttccatttatcaaattgagtatagtgccttcctctgtcctaccagatgaaagtttatgaaagatactaatcatttccaaattccttcatttttactatctatccagattattttaaatacagtatctctataaatagcactttgtccattgatatatgtttgtgtttacatgattgtgtgtgtgtgtgtgtgtgtgtgcacgtgcaaaacatggaaataggatatttggtctaccttaatccctggaatggaagtaatggtgattacttttgtatagcaagtaataaactcccaaatggttggcatttcctttttcttatactagacagagtcaaaggtgaaggatgataaagaaaagttttgacaatagtgccaaattaccttcctcagttcctagattggggattttcaatctaggggcagatgtcactataatataagaggtctagtccttgatttcagaagcagctatccaagctcttataagaactgatgataggaacttgtctctcttctcaagttctgtacaacaaccacttatccatagctcttgatggttactgctcagccatttcttgccagctgttctttccatgtgcagggagagcatgggagtatggagcctcagtttggtttgctattgtcaggacatcaaactaatcattaggtagaaagttgaataaacatttacttttgacttttaaatggttacttcagaaagttttacttagcggcaagaccaactacataatttgcggggcccagtgcagtgtgaaaatttggggtccatttttgcaaaaaatattaagaatctcaagatagtgacagagctttaaggccaattcaggctcctcctgcgtgcaggactctgtgtaactacacaggtagcacagctaggatgcagacgctgctcaatgttatacatttagtactttgatgtccctgaattccttacaaaactcttacttcctcccctccccacccaagtccccagctcttctgtttttttccaaaactttacttgtgtacaacactatgaaacatgacagggtctgatgagaaagtattaattggctttaacctagttttttttcatttttatttctgaatatcagcactcatagcccttttccctattttctgacttaccctaatacaactccatatcgtacaaagcttcatagtcctgtatatgcatgtggtgaacatttgtgtggctatttgcagctgatggattagtatccataagttgagaggattcttcaaaggtcctgagattgaatatgaaaaaatgacctgtaagaattaagtcatccacatgtagcacagatggacgaattaccaagggagatggcatatatctggatcacaaaagacttataaggcaaattaaaggcatgtattctcatcaaagtaacctctgattgctttatttcctggaatactctattatcggtgtcagggttctccagagaaacaaaatcaataggatgtatataaatttcctgtatggaatatggtttggttatgtaggaagtgcagaaggatgagtgagtggaattacatgtgaggaattggctcccatgattatgaaagtgggcaagttcaaagatctggaggtgagtcagcaagcttggctagagacccagttggcaggctcaagactgaggaggagctgatgtcccagtttgaaggtagccaggcagcaagaattctctcttacttaggggacagtagtctttttgttttattcaggccttcaaatgattggatgaggcctgcgcacactggaaaggccaatctgttttatttggtctgcctgtttaaatgccagtctcactcaacaacactcccaagaaacacccacaataatgtttgaccgaatacctggagaccccatggcccagtcaagttgacacatgaaattaaggtaccacagatatcctattgtcacaaactctgtatagcacttaaaattcctggtttcatgcttggtacagaaagttagctactgttcatcatttgtttaattctacacgtggccataacttaagattaattataacaaagtttaattagaacgaaagatgtaattagatgtaaattcttgcatcaagtggttgctttgtgctaggcacaggttaggactgcaaagatgactacaaatggctgattactacaaaggacattgtagtaattttatttttatttttattattttttttgaaatggagttttgctcttgttgccccggccggagtgcaatggcgttatcttggctcactgcaacctccgcctcccggttcaagtgagtctcctgcctcagcttccctagtagctgggattacaggcactcgccaccatgcccagctattattttgtatttttagtagagacagggtttcaccatattggtcaggctggtcttgaactcctgacctcaggcgatccacccaccttggcccaccaaagtgttgggattacaggcgtgagccaccgcacctggcaggacattgatttagaaacagctttattaagtggattttacctgagagtttcttcctatacttttagtccttgtcagagatgtgatgtattttctcttgtgactgcacttttaaagttggaatcctatgaatgccgtcagcactactatgtggaatatggtttggttatgtaggaaatgcagaagactgagtgagtggaattactcaaaagtggatcagaaagcagttatggtcatagacatcagcctcagtggggcaacaggagttggaaggagtaaactgagggaaaaaatcagtagaatactggatggagcagacagagtgagactgaatgggagaagggtgaggtgggctgagacagctggtcacattcagctctaaattcttgaagaagtagtttagactacaccaaggatgggggataaaacccagcctagagctcagagaaggtggatgtggcacgggaaataagaattgtcattgttgaattccttgagaaaaaaatgtgaagaagaggcttgaggcctcaaagacattgcatgcatgagtcagaacaagcttgaactacaaggaagatttgattaatgaatcaaatattaatgccacattttctcttatttcaagtgtttttttttccaactattatctctgtgtagaatgtcttcgctctctgccatcaccttattattaataactcctattaactcttaggtctcagccttgctgttacttcctccccagaagtctcctttaacccctaaagactgggcttggtgcttttctcctgtgttctcaagtcaccctactctagaactatgtcactgatttaaattgctttctggtagggcgcggtggctcacacctgtattcccagcactttgggaggccgaggcaggcagatcacgaggtcaggatttcgagaccggcctgaccaacagggtgaaacctcgtctctactaaaaatacaaaaattagctgggcatggtggtgggggcctgtagttccagctacttgggaggctgagtcaggagaatcacttgaactcaggaggcggaggttgcatccagccgagatcgcgccactgcactccagcctgggcaacagaacgaggctccatctcaaaataaataaataaataataaaataaaaaagaaatcgctttctgacatgtctattttcctgaatgagctgggagctcctcaatgacaatagctatttcttgtttaaagtcgtatccccagaaactataagcttagtagatatttgctatgtgaaagaaggaatgaaagaatgaatgaggacttgattcctgtactcccaacaacatttaagacactgtgctgagtattcagtaaggaggcatcaggaagggtgaggtagaggtggtagtgaaaccaaaaaattgaacactgttcctggcttcagagaacatgtagtctattaacaattgtgaataatggtgtaatacaagacacatgacataatacagtactacaacacaagacaagagaataggattgccatatttagcaaataaaaatacaggatgcccagttaaatttgaatttcaggtaagcaacaaatagtatgtatatatctcatggactatttgggagatactaatactaaaaattattcattgcttattaaaattcaaatttgattggatagcctatattttagcaaccctcagtgagaagaactggagctgtaagagattgcttttgtttttgttttttcattttttcagggatggaatggaggtcttggagaaaggtaaatgatttgggaaatgttttccggaaaagataggaacagagttgagttgcaaagatcacaagacaaaatgtgagggggtgcagttctggtagaagaaacctcagatgaaaaggtgatactgtggcaggatcagagactggctgacatctggtttggccagagtgtgaaagggtggtgagaaacccaactacagggttgggcagggcctggtgactccatatgttccaaagcctcagtctcctgggcaccctgcccccttcgccttggccacgttttgtgaacaagcagaactagatcttgctgcctgggcaaatgtttcatccttacctagttaattaggcttgaacattagtttctctctggaaatagtgaagaagaaacaccaggagcattttgcaagggtcatacattgctcaatgtttgcattttttcaaaaacactggtgtcaaaacagcatgtccagcaaagttgagggaaaagtgaaaactaatgatgacttatcaaaacaagatgtgatggtgtgggaaatgctactaacttctacagcatttgtaattttcgtctttctcttctgttataacatatgtttagcattatatagtaaatatagaataaaacagatacaaatagcttatttgtaatctaagaagagggggaaatgtttagataataaagttgggcacctactgtgttccaggtggcaacatatgttatttctcttaatcttcataacaatactataatactatggtatatattatgatgattttaatgtgcatcttgctgaatttcacaatgtttatttgctcatctatgatcactcaactagcaattggttattttgaaattcaaatctggtttgacttcaacatctatattgtttccatttaccacacctatagataggtactcacagataaacaataattatggtgcagttatggcagatacactgtgggaacagacaagagggagcatttaattctgtcttgaggacatcaagggtggctttggaaggagatgatgcttgagtggtgattgatgacaatgatctcattttctaataagtttaataacaggcaatgcatgaaacatattcacaagtaagataaatattaatagttttaaaaacacatgtatttcatcctaataagctctcattaggtttctgtaaccttttattaaatgttccacactgatcacattgatgacaaacacaaattctttttttttttttttttttttgagatggagttttgctcttgttgcccagactggagtgcaatggcaccatcttggctcaccgcaacctccacctcctgggttcaagcgattctcctgcctcagcctcccgagtagctgggattataggtgtgcaccaccatgcccggctaattttgtattttcagcagagacggggtttctccatgttggtcagacttgtctcgaactcccaacctcaggtgatccgcccacctcggcctctcaaagtgctgggattataggcgtgagccaccgcacccggccaacaaacacaaattcttatacttgctaccacaaacatcattagtcatatttattagatggtcattatttattaatttaaattaaataattaaatattcattaaatcattaaaaccttcagctacttatatgattatagtttggtgctgtttttgcaaagacactacacattcacatagaaatatgtctaaaacttttttataattctataaactacatgaatggttatacagttgagttgactaaattcctcccacataattatttcaattacataaaatattacttacataactggaatggtattatagctataaaatactcaagtctgtagttacataaaattaaattcagtaaaaagaaaggcctaaaattttagcaacatactctctagagaaaagctgctaaacagttgtgtttctataagttttaaaatacaattgtaaaaataaaaactaaaaacaaaatttttcaaaattttgctttctcaaaagacattagccaaattttaataaaaacattgaagagtttgttttgcatacactccgatgagatgaactaatattatcatccccttttaaaccaaattttgtttgcaaatcttctctccaagaagccccctaaacagatcttactttccttttggtaatgcttacttatgatctgttggcaacttattcgtattgttacaggtagttagataggcatgagtggggcaggagagcgctcttcccccacccactaggaatgtccggggatggtttgacaattatcacactgcctctctagcaatgataattcagcagcctgtgccagggagagacaatctcctgatgatccacagctgttaacattaaagtgttaattgaatgcagatgccagggaaagcagcctcctgggcatgtaccgtaaaagacaagttggcggagtatgaccttttggggacactccatcggaaaaaagggaaggaaggatcagacgcggctgtatacaacttcttaaactcactgtgtgctcaattcccagaagtaaggagggcactgcgcatgcgggaagcccaccctaagggaggaattatgggaaagaggcaagcctgtaaagcccgaggatcaaggttaaacgctctctttttgaccttcaggcaccctcttgggtcttttacaagtgaactttctttcctgttttaaagccttttaaataaacttccactcctgtgctgaaacttgccttagtctttttttctgctttatgcccctcagtcgaattctttcatctgaggaggcaagaattgaagttgctgcagacgcctgtggattcaccacaagtacattggagtaaccactgggaacaacaggttgccttagaagctttgcaggttgttttgtttttttgtttgtttgtttttttgagacggggtctcactttgtcgcccaggtttgttgcccaggctggagtgcagtggcgcaatctcggctctccgcaacctctgcctcccgggctcaagtgatcctcccacctcggcttcccgagtacctgggactacaggcatgcaccaccacacccggctaattttaatttttattttgtatttttagtagagttggggtttcaccatgttcccagctggtcttgaactcttgaggtgaagcaatccgcccacctcagcctcccaaagtgctgagattacagacgtgagccatcgcgcctagccttgcaagttgttttttgttgaacagaagaagctattcaaaaatgtccaggactctgttatttattcagcaagcttacaaagccatctttgattgactgattctttgacaatgactatctggatgacacaggaaggatgcaattctggccttggagagaaaacttgcaaggaaaggaacatgtttgaatttcagatgtgttcctcaatgaatcacgtaagtttgctgtttatattcattaaagaatacgttttaaatgaggataaaattacaactttcatacaatataaaataaatgtgtcggatttaactcaggaattaataaggtgataaatagatgttgcaaggagttcaaaagagaaccacacatttatggttaaataaggaatgtgaaatgaatttacaaacaaatgcaaaactggcaaaactggtcaatatccacacaaacccagtttgcattttcatggacagagattatttgcattccaatcaattttctccaaggtaacttctgtgtctaaagagttgtgaaatagcccaatcagaggcaaacaaaggcacagataacccagacggatgagctagacaaagcatttcaccttttttctctacgtattctttctttaccagggtgattttggtgcatctgacaccttttcaatgattaataaatcaagatccagaaattagtgaataaaattaagtattggggactgtagggggaaaacatttctctctactctgcatatcttttagctggggcagaccgccgcaacaaaagactgattaacgagggaaaaaaggacgtttcataacgtgtatcttctgtatacctgggagaaacttagagaaatgagcaaatctcaaagacatggctttgaattcaggcttaaatcctatcttccactgaaacaaagacagaagggtgaggggaaggccagttatggtgagacgcccaggaaaacacagtaagcaaaggtcaagtttgttatgcagatctaagttggtgccttctccactgagtctctaatgatttagtcatccttctcatcctggtacagagaggaagacacttacaaatggagatttcctttacagatatacatttttcttacaaaagggtaacttttactctgttttcagagcttctcctgtgtctgcaatttctcaaaatacctcaaaataatccttatgccaaacaggcatattttcatctcctacaggtcaaagatattcacattcaagagtttgggaatgaaattcattttggataataatataaaaatcaaggtttcttttgagggcatggcgttaactaattacaatttgacacaaaaatggaactgtcattctattttctgtacatggtccatgaaatacaacatgagaatttggaatgatttgggtcagttatccaactaccagcaatctccttgtaactcacagatccccctctataataatcacaatgataataacagcaataataataaaaactgtgacacctgagtcttattgatcccttaacaggtgccagacgccgtgctaggtgttttagctataatttcttaaattgaatttccataatagcatatacagtggatgtaattatgctaatttgtgaaatagcagttcatgccttccttcctctcagcccctcttttcaataaagtaaaaaaaatttaagcaaacaagtttcattgaatgatctcgattatagtatttcaaaagcgtggttcagggaactaaacagccatccttctttggctatggtttcctcaacaacttggcttctttcccctcagtttgagaagttatatataactttatgtaatcactgatgtttaatttctgtgaaatgctttaaaaagctcacaagatataaaactctcatttattcccctttttataagtggaaagacttgaagaggacttgagtcctttgcttttacagagttagggtctagagctgttgacttctagccattcagagagaaaacatctgaaagagttatgcagtgaaatcacaaagcaaacattgtttggggaactaagatagtatctagactacacacactgaaaagcgaatttatgtccacacttattttcttctttgcactcctctctctcctttcttcttcgtctctgttctctttatccacttcatatgctgcaagagacatttagtacctgactacacaaaaagaaatgtgctgagtttgactttcttttttgcatacactagggaactaattttagcgtatgttgcattcttttataaatgacttttttttggctgtcttagagttctaaactctcgctatcgtgctgtgcatttttatttccctgctttgcactgtggcagaaagaaagcaaaaagccatcactacactaggggcgccctctaaataaagacggctttccccaggtctgactgtgactttcccccaccccactaatggaaagggttagaaaaaggaagtagcatgagtcactgctattgccacaccctcaggaaaacccctgctccatcttcctcttgtgctacgatgactctttctagccaaggtcctgggtcacaggagcaaagttttcaaaacatactcatgagtttctggaggaatgcagtgtcgaactgattgacaacaacaagaatcaaaacaaggttagataccaaaaaataaaaataaaaaattatttgactgaaaaatagaagaatgggtctgatccaaacattcatttatgagctggttgtttgaaagtgaaaacgtagtttccattttttacatatacatcctcgatgattgttaggactgctagactatccactcaaggctatcctacacccaaatggctgaggtgcgtgtaatattgtttctgtggggaaggttcagttggctttcctgtttggttaccagggacatattttcccatccttcaccacggttctaacagctggtggggtgatgttcctttagccatttggctgggcaatgagaataggacttctggagacaaaaatacttgccacagagataaatctgggaaggaagaggggaaaaccctgatttctgttgtggaggagagaaggtaattttgatatggacagaagacagggaaatattgggtagaagagggtggttccccagcaaagtcccaaccctcaagccttgagacccgtggccgtaagtgggaacaggcattatgtgccccaaaagttgccttttggctcgccatgcccctccatcctgtacccatataaaccctgaaccccaggctccagaagcagatgagcagatgaggagacaagcagacaaacagcgcagcagagaaagagagaagagaaggaacatctgaacgctgagaggagctcagctgggggtggttggaggggagtttgactgctggatggccaaactccaggggaagatcatcttcccactccatcctcctcccagctccccatccatcctgctgagagccacctccatcactcagtaaaaccccacattcatccttcaagcccgtgggtcacctgattcttctgggatgctgagcaagagctagggatacagaaagctgccatactggtcctctgcccttgcaaaaaggggccgcaggcacccacccctagatacggggctggagcccaaggcacttgccccagctcctacacctgtcagtctgtgtgtttcccctcccatcaggggtttgagcaatggtgacaactgaagagcagtggtgtcgactgaacaggcgagccatacctctgttgcatgtcctgcgagagggatcaggaaactttcccgtttcaatctggggcaactgcctgggtcatttctgtcactagggatgggaaaatagaggagaggcaggagaaaatgtggggcagtgggaagtgatggtcttggtgaggaacagaatgaaaagtcataccttctaggagagtgaggactggtttgctgtcctcacttgtaggtgtcaagtggtgtcgcattgtaatttttatttgtatttccctaatgacaagcacgtttttatgtactcattggccatttggacatatttgaagacatgtctatcaaattgtttatttcttaattgggttgtctttttattgttaatctctaggagttcttcatatattctgcattgtatattcagtctttgattatatatattatttgcacatatatttttccaattctgtgcgttgtctttttgttttattgattgtgtccttagaaacggggtttttgatttctatgaaatccaatttatctgctttttcttttgttgcttgtacatttggtgttatatctgtgtattagtcccttttcacaccactgataaagacatacccatgaccaggcatggtagcttgcacctgtaatcccagcactttgggaggccaaggtgggtgaatcacttgaggtcaggagttcaagaccagcctggcttagatggtgaaaccccatctctactaaaaatacacacaaacacacaaaattagctgggcattgtggcacatgcctgtaatcccagttacttgggaggctgaggcaggagaatagcttgaacccaggaagtggaggttgtagtgagctgagattgcaccactgcattccagcctgggcaacagagctagactccatctcaaaaaaaaaaaaaaaaaaaaaaaaaaaaaaaagacatacccgagattgggtaatttacaaaagaaagaggtttattggactcgaaagttctatgtggctaggatggccttacaatcatggcagaaggtgaaagtcacatctcacatggcggcagacaagagaagagtgagagccaagcaaaaggggtttccccttatagaaccatcagctctcatgagacttattcactaccatgagaatagtatgggggaagctccccccatgattcaagtgtctcccactgggtccctcccacaacacaacagaattatgggagctacaattcaagatgagatttggctggggacacagccaaacagtatcagtctgtaaaccaaaaataaaattctaagcccttcaaccatctgaatgaaccactcctcttggccaagggcattccaaagttaacctgaaaaactagttcaggccatgatgggaagggagggtcagaagtgcctcattatatatcctcttcccttttggaattcaggaaaagccttccagcactaacatcaacacagaccttaagtcttacaagaaacatttaccatctattctctctgaagcctcctacctggaggtttcatctgcatgataaaactttggcctccaccatcacttatcttaacctagacattccattctattaatttcaggtctttagataatagcttaactctttcaaccaattgccaatcagaaaatctttaaaatctacctatgagctggaagcccaacttcaagttgtcctgcctttctagatcgaaacaaagtacatcttacatgtattgactgatgtattatgtctccctaaaatagataaaagcaagctatactcgaccaccttgagcacatgccatcatgacctcctgaggctgtgtcacgggtgcatccttaaccttggcaaaataaactttctaaatttattgagacctgtctcaggtacctttggattcacaaatctaagaaaccattgcctaacccaatgtcatgaagatttactcttatgctttcttctaagactttttttttttttgagacagagtctcactctgtcacccaggctggagtgcagtggcaccatgtcggctcactgcaactttcatctcctgggttcaagcaattctcctgcctcagcctcctgagtagctgggattacaggcacccaccaccatgcctggctagtttttatatttttaatagagatggggtttcaccatgttggccaggctggtctcaaactcctgacctcaggtgatccacccaccttggcttcccaaagtgctgggattataggcatgagccaccatgcccggcctcttctaagacttttatagttttacctcttatatttaggtctatggttgacttttatagttttaccccttatgtttaggtctatgaatttttgtatatggtgtgaagtagggcttcaaatttattcatttgcatatggatatttagttgtcccagcaccatttgttgaaaatactactgtttcttcattaaattttcttgacatctttgctgaaaaatcatttgacctataaatgtaagagtttatttctgaatccaattctattctgttgatctatatgtctatgcttatgccagtactacattatcttagtcactgcagttttctaataagttttgaaactgataagcctaagtcctacaattccaggttgttttggttattgtggttcctttgagttcttatacaaattttaggattggcttgtcaatttctgaaaaaacatagctgagattttgagaaggattgagttgaatatgtggattaatttgtgaaatattgccaccttaacagaagtaagtcttctgatccatgaacatgaggtatcttcccatttatttagatcttctttaacttctttcaatgatcttttacagattttcagtgtacaagtcttttacttaaaaaaaattattcctgaggttttcttttatacttttgcaaacaaaattgttttttattgtatttcttattgtttattgctattttatagaaataaaattcatttccgtaaattgatcttctattctgcaaccttattatgctggtttgttagattcttatagttttttggtagattttccttaggattttatatatacaagattacatcatctgcagatagaaacaattttacttcttcctttgtaatctgtcaagtctgtattcttttttatgtgcagccactgaagtctctgcctagtctgattagcagtcagctaattattagacagagattttcttaaatgctttgaaccactaagtttcccagtctttgctgatgggatatatgtgtgcttaccttttatttctttctttctgcctagctgctctggctagaaccttcaatacaatgttgactagaagtggtgagagtagacatgcttatcttgttcctgaactttctttcaccattaagcatcatgttagctagaggtttttcatagatggcctttattgggttgagaaacttctcttctatgcttagtttgctatggggatgggggtggatttcatcaattgctttaagaaaatgtattgagatgattatgtgggtttatctttaattctactaatatgctatattacattgatagatttcttatgttgagccaaccttgcattcctgggataatctcacttagtcatggtgtataatccattttatatgttgttcaatatggcctgctacacttttgttgaggatttttgcatctatattcataagagatattagtctgtgtttttttctcttttgatatctatatctgattatggtattatggtgatatggcctccatagaattagctgggaaatgttcctttctcttccaccttttcagaaaagtttgtgagtgatcttcattctttctaaattattcagtggaattcattattgaaatcacttgagcctggactttttgtgagaagtatttggattactaattcaatctctttacttattataggtctatttgaatattcagtttcttctgagtcagttttggtagtttgtatctttctaggaatttggctacctcatctaggttatttaatttgttagcacacaattgtttgtagtattttcttataatccttttatttctttaaacaacttaatgatgttctttatcatttctgattttagtgattggagtgatgtgtatttcttatatggcatgtctgctactgatgaattattttagttttagtttatctgggaatatcttactttctccttcatttttgaaagacacttttgcttaatatagaattcttgattgacaatctttttctttcagcactttgaatatattaactcccatttccttctgatctcaatggtttctgatgaaaagccaacagttaatcctactaagaatcctttgtatgtggtaagccatttctctcttgctgctttcaagattcttgctttctctttgtctttttacagtcagattacaatgtaactcactgtggatctctttgagtttattctacttgaatttatttagatttttgactgtgtaatatgtttgaccaaatttggaaaatttttggccattattttttcaaatgatatttctgtctttttatctatcttttcttctcttggactgccatatgtttgtatgcttgatagtgtcccacaggtttctgaagcttgttatttttttttttaatcttttttctttctggtcctggataatcacaattggcctatcttcaagttcactgattctttcttctatgagttcaaatttgttgttaatcccatctagtgattttaatttcagttatacttttcaacttcagaatttctattctcttaaaacaataatttatatctttttatagatatttttgtttgatgagacattattctcacactttgttttaattttttagatgtggtttcctttagttcattagatgattaaaggtcattgttttttgagtactcacggacatatatatggcagaaatagacaccggggactactagaagaggaagggagggagggggacaagggtgaaaaaaaaaaaacaactattgggtactatactcactacctgggttacaggattattcataccccaaacctcagtatcacacagtatacccatgcaacaaagttgcacatgttcccactgagtctaaaataaaacatcaaattataaaacaaaaagcaaaataaaatctttgtttgctaaatccaaagtctggactttgtcaaggagaatttactgcttgttttcttttgcacgggacattcttttttttgtgtgtgtatgtgtctctctgtttttgttaaaaactggacattttaaataatatgtctattcgggaaattggatgctctcttctccccaaagtttgttgttattgttgctattttttcttactattattagtttgtttattcgtttttttagtgactttcctgcactaattctgtaaagtctatattcttcttttatatgcagccattgaagtctctgcctggttagattggtagtcagctaatgattagacagagatttccttacattccttgaaccaataagtttcccagttttgggtgatgggatatatgtgtgggttggggtatatctttaatattcctacaggcagtttacaattttgccttaaactttcttcctgcttgtatgtaatcttaaggtaagccagaggtgaggaattaggatcttctcaggtctttcctgtgcaggtacacagccctgcacatgtgaatgaccttctgtatttgcaggaatatgtgtttgctttccaaagtctcttatggacatcttaattccttggtggttgtgttttggtcggtttcctgttagctccaaccagtaacattgtctcaggcagctgcaatgtgaaataattgccacctatttttttttttaaacaaatgtcctaggaatagggctgttggcacagagcaaattctgggttaggtcaaatacagaaaagccctgagaacggatattttcagtgaactgccacacaggtcaagtcttaacaattatgagatttgggggaagttttatatccatatccatttgaccctctccagtggctgccaggctgctggttttcatagctaccgtagttgcgaggctgttggttttcaatgttaccatggcattggggtgggggagagggattaggtcaagttaaaatgccacaaaatagctcactggtcttaccaagattcagccattttttcctgactaaacagtccttgacattttgcaatcttttagttaatttccagagttctgaaaaagttaattttgacaatttttgccactgatctcattgcttttatggatgagcagatttttgatggtctttattctaccattcaagaagtactgtcttttttagcatgttaaaaggtaagtttttttaaaaaacataaaccatgacacaaaaattataaaaatagtaaatgaacacacgccaaagactttatttaactctgtatttattgtggagcatattaagatactatacattcaaaagagaattaaatacacatacacacagagggaattgagaatgctgaaatcattttacaggcatattgggttaatacctacagcccaataatcaattgtatttcacagggcccaattcactttcatttcttcaggcaagcatcatttgtgttattagtttttgacaatattgagagtagtgaagcagctgaaagggagtacaaggcaaagatacactagaaggatagacagacagagtcctggtaatcttttttccccacaataaagtttttgtagtttttcctgataagggaatggagaagagagtgtagggaaaagcagtataacattttgagaccctggacatgtgactaaaacagtggaaaaggacagagcagagtgcaggggtgttcaaggtagctgttgctggcctcgccttcagtgataaattcttctctatgccccgcttcctcatctgtaaggtaaagatatggatcagctgattgctaaggctcatcccattccagctgtattcaaatgtggcccccagaactgcagcatcagtatcacctgagaacttgttagaaatgcagatccttaggccccatcccagttttactgaattggaaactccagtgtagatctcagcaagctctctaggtgattttgatgcagctgaattttgagaaccattgtatatcaattttctatgagatggaaatttgatattgatatgatatagtttggctgtgttcccattcaaatctcaccttgaattgtaataacccctgccgggtgccaggtggagataattgaatcatagggtcagtttccctcctactgtacttgtggtagtgaataagtctcacgagatctgatggttttataaatgggagttcccctgcacacagtgtcttgcctgtcgccgtgtaagatgtgactttgctcttcacaggccttccaccatgattgtgaggccttcctagccatgtggaactgtgagtcaattaagcctctttcctttataaattacccagtgtcatgtacatctttattagcagcgtgagaatagactaatacagatatcaaggaaactccattagctatcatgacagcatatttagaattttctcctaaactttgaaagcatcaattatttctgtgtgtaaaaggaaaaagtcagtttggttaaagctctttttattttttatataaaaaaaggagttcggccgggcacggtggctcacgcctgtaatcccagcactttgggaggccgaggtgggtggatcatgaggtcaggagattgagaccatcctggctaacacggtgaaaccccgcctctactaaaaatacaaaaagttagccgggcgtggtggcgggcgcctgtagtcccagctactccggaggctgaggcaggagaatggtgtgaacccgggtggcggagcttgcagtgagccgagatcgcaccacttgcactccagcctgggtgaaagagtgagactccgtctcgaaaaaaaaaaaagaaaaaaaagaataaaaagagttcatttcttcttactcagaattcattatagagagtagcttatcattgctctatgtccatttgttgtaggcaaaacctcaattcacaatttattttaacataaccagtccaaagaaaggtcagagaggtattttttgtagctttgagtttcatatattttatatagttagaaacttctctcctagttatcatagtggggaagggtgaggtcagacttccgaagtcttgtgctggaaagtttttggtctttctcttcactcacaaaggcagtgattacaggacactatgggctgtgcttggaaaacttttgtataaacctcagtccttgggttgggcacttctctgcttacttatgatgagctattctgtttgtttggtacacagtagactggtcctgtttgccactatcatttccttacggtttacagctatggtgcaccatttaaaatgatggttttcagtatcctaattgtatgatgtgtcctttgtacattctcagcatgatgctctttccagcgttttctacagtagctgttctctgctcaaccccatctaatcaactcgtgcaaaggtgatcattgtttctaagtggatgccctggccagctttgaaaactctcttagcaatgacttatatttaagcataggtcactgattacattggtcaaagtaatatctatgaagttaagaacaatgagacctcagaactagtagtcaaaacctcactgttcacaatgtagggaagtttctccagcaggtgttaataggtttactacaaagaaagcattgtgtctgtggtcaaatctctcaaagacttctgatgtacattcgtatcgaacactctgagagtcttatagtaaagaaacatctaactgtgtgtaactcacgttttcaaacttatttgagcatgaaacatttttaccactggcatatctaatcacatccagtttgggaaaggatgtgtagaatatttgagatgatcgttagaacttgttaaaaggagagtttcttaaaaatccaggagtgtggtgcaatgctgagtcctcagagcctccctgtgtttccataacagagataaaataagactggatattcacagaatcctgttttattcatctaatgatcgaaagaggtaaattatgtgagagaccgtcctgtgcaacaaaggatcaatataaatgtgagttattcgtgattatggtaactgagttgactgcagctttgttactcaaaatgtggcctatgaaagcagagcattggaatcacctgagtgcctgctagaaatgcagagtctcaggccctaatccagatttatttcatctaaggctgcattgtagcaaaatgtgattcctaggcatgttaaagtctgaaaagcgttgattacagccttttgtactcttcctcttcctgacatatcttaggttcatttcttctacctcatttcggtgcctgccccatctggaattctttgcaatacttctcttcctggaaattcataatctttaccattcacttccatcaaaattttgttcctcttttccctccctgaattctaatattatatgtggtttttttgaatgccaatagtatgcctggacctaggaaatttctcagaagaccacagtaaactttacaaaattttaaaaattccgtaaattgttcaacacttgttttcatctgttttctgctgctataacagaatggatgatttataaagaaaggtttatttagatcatggttctggaggttaggaagtccaaatggcactggcatctggtgagtggcatcccatggtgaaagggtggaaggtgggattgagcccatgagacagagacagaaataggggccgaacttaggtttttatcagaagcccactcttgtgataattaacctacttccaatatactggcattaatccattcacgagggcagagcccttatattttctttatagtgttaacttcttaaataaaggttccaccttccaatacccttacaatggcaattaaatgtcaacatgagtttttgtggggacattcaaaacatagcaactgtcaattagttttccaaagtcagtctctctaggtctttctttagttataggaagggacaaggtacggggctgggtgtgttaacaatccctttccatttaataaaggttgctaagagttaaaaatctaagttctgcctatacaaaaaataacattcattatcataatagtttaatttcggatgagatcgggcacgtgcagagtggtatggctgtagacacacaatagtttcagaagtcagactgtcagaaccatatagtgagagctaccataagcaccaaaaagcccatgtatagatttctctagcaaagacgcttccttaacggcgccactgctccaggatggggttgaggtgttgctggggattggtagccacattgcttgtaaagagactgtacttgctccttccagtctccctatgataaagttttaagaatatcataatgagaatttttaggctacatatagatttttccactgtaggcagatgaaatcacatattctggttagacattagataaagcttctgagatttggacatgctttcattagacaaatgaatgtaatttttgatgatctaatactctgcatgtttccggaggaagcagttaaagacaaatttaaattctgacaaagatttattcagcttgttctttggtggggaaaggaagctgaatagtaaaatgtcaacgattcaaaactcctaattttccttgttccaagtaaagaatgagtttctagataacagaatttaaaaaaagttcccgtaagttttcccttcttcagtactctcacaaatatccatgcatgccagtaaataatgtaaccttaatacattaaaagatgaatcatgtaaaagggaagtgaaaatgacaaatatgggaaaaaatgtgacacaaagaagtgcattatgtgtttattcgagaaaccatgaaaacttctgtgaaaaagctaagtgcatgagatcactactcaacattttaaatccctcagtgctgaattttcatggtttgcaagcaatctgaagggcattcaggcttctaggaagaagttttgcaactttgaatttttgcctgtctcttggccttaatacagcaatttaaaaataaagtatcaagggaactcagcctgtctctaaattgaggaataatattctgcctttacaagcctgtgacatcacgtatcttcttactttacaaaagctcaaattgcttgagcattaagatattaagaacctagtcatgcacagaaaacactagttttttaaattttccaaagtgattggctctgaaactctagaacagtgttgtccaaaacaactttctgtaataggccaggtgtggtggctcatgcttgtaatcccagcactttgggaggccaaggtgggtggatcacctgaggtcaggagttcaagaccagcctggccaacatgggaaaccccatctctactaaaaatacaaaaattagctggggttggtggtgcatccctgtatttctaactatttgggaggctgaagcaggggaatcagttgaacttgggaggtagagattgcagtgagctgagattatgaaactgcactccagcctgggcaacagagtgagactctgtctctaaaaaaaaaaaaaaaaaaactttctataatgataaacattttctgtgtatatgctgtccaatgtggtggccattactaaatgaatatttaattttttaaaactttaattaattaaaatttaagtttaaatagctgcatgtggccagtggctacagggttggataatgcaaccctaggaatattttctttatggtgttaacatataatttaaagcattatttttatgtcttaatactattttctagtttatgtatatagaaaaaaacctttaataccttagatgagaacaaatttttagtgccattccttaaagattattttcttggaaataatgacataagtggtccattagatgatgttatatgagtcatagaaatgcttgatataaagtccaaaatatcctcacacatgtggtctgtgaggcaggcttgtatatagaaaaaaggtggaggaaattatgaacacagggaaggaggtaaaatcattgctggtgccatatgtctggatcttctgttttcttctattgtgatttatgttctttttaaatgactttactgagccctttgatttattttgtgataaagattaaatattttgtccttttctgatgtttaaaatctgagattagtctaaataaggtgacccatttttttgaggcacacactgcccacctgtcatcataccactggcaaagcctttagataatgaactagtacatgtgatagcctccaaaatgctccctttgagctctttctttatttttaaatgtcttgctaatggagtttcttaaaactgtttttttcttggagtatttccttcagggttggtttatataccacacaggaaaccagtttcattacctgataattgtgctttggttatagaaccaattctttgaatgggctggacataggaggccaagtagaagtcagccttgttctttcaaaccccctctcagatttctctttcctgtctatggataaatttgtcttaaagatcccattttcaggtattaaaaagtccagcccatgggaaaacaatattcacatgtaaaataatgaagttggatctttacctaacatcatatataaaaattaactcaaggtatatcaaagatccatttgtaaaacctaaaattatataaatcttagaaaaaacacagggcaaaagcttcacaacattggatttgaaaacaatcttttggtggctgttataccaaaggcaaaggccataaaagaagaaataaacaaattgggcttcatgaaaaattttaaaattggacatcaaagaaaatatcagctggctaaaaagacaacccacagaatgggagaaaacatttgcaactcacagaaggggttgattagtatccagaatatatagagaactcctaaaactgaacaacaacaaatgacctgattcaaatgggcaaagaacttgaataggcatttcttcaaagaaggtgtataaatgatcaataagcatgtgaaaagatgttcaacattaacagtcactggagagatacaaatcaaaactaaaaggagatcccgcttgacactcattgggatggctactatttaaaacaacacagaaaatcacaagtgttggtgaggatgtagagaaattggaacgcttgtacactattggtaggaatgcaaaatggtacactgttgtggaaaatggtatggtggtggatcctcgaaaaattaaaaaatagaattaccatatgatccagtaattatgcttctgagtatatacccaaagaaatgaaagtggtgcacccatgattatagcagcattatattcacaatagctaatatgtagaagcaacacaattatctattgattgatggctagacaggcaaaatgtggtaaatacatacaaggaatattactcagccttaaaaaggaaagaaattctgaaatatgctacaacatggatgaacttgaggatattatgttaaatgaaataaaccagtcataaaaagacaaatattgtttgattctacttatatgaggcacttagggtaggcaaattgatagagacagtagaatggtgtttcccaagggcaagggggagaggaaagtggagagttagtggtttatgtgtacagaattttagttttactgaagagttatggagatcgatggtgataatggttgtacaacattataaatgtatttaataccactgaacatatacttaaaaatgactaagacagtaaattttagttatatgtattttaacacaatttaaaaaattggaaacaaaaagtccaacctagggtaacatcaaactttcaatcacttgtccaatttaaaccttctcccatccccccacagctcaggtgcctgggtcctggaagcctacagtggggaaggggtgttgcggtcagcttctctggtcctcctgaccaccttttctctcatccacggttcctcacgcctctagggtagaatgcaggagagtgggaagactagaggcatagcacagtcttagttggctggcactgttacaactggctgtttccagccctctgggaggcagatgcccaaatgcaccctccacactttctctcatgaagtagtttctgaaaatgcccaaagggtcctctcactaccttgttctctggctttgagtatgaaagacttggttgtgaagtaagccatgtgatcagatgactgcttatgagccttgcttagcaacctcatctgatcagatcccatagcctctcctttaggggttgctttgccctgccaggcagatgccttctatatggccctttcaagtgttcccaagacggttaccttccatagtctccatttaacccatagagcactcagcacctggcctcagacagggtatgaaggtgtaggccgcttctcttcactttgcttagaagggagctctagctggcctctcattagactttgtcagatgagaatcagacacctgtcctgtgtccctgtaagtccaggaaactccagttcctctcagggcccgtgctgttgctggggcccagaacctgccccaatttagctggctccagctggctaggggtgggggacgatgggaagggtgtggtagtggtaagctgtcttactcccttcctgccagacaccccagtctctataagcagttattctgaagactctcatttggcatgcgctatggactgaacgtgtgtcccccgccccgcctaaattcatatgctgaaactgtaatccctaagatgatggtatgaggaggtggagacttcaggaggtaattaggtggagccctcatgatgggactggtgcccttttaagagacaggagagcgcttgcttcctctctctccaccatgtgaggacataccaagaactgattcagcctgcacctgggtcttcacttccagcctccaaaactgtgagaaataaatttctgttgcctaagccactcagcctatgacatttttgttatggcagtctgaactaactaaggcaatatgagaatgggagagaagcgctccagctactctcccagggggaggtgggacaaacatacaaagaaatccctattaatctttgtactcctcctgaatggaaactgaaggaaggtgaagtagatgaggttcaagtcacctcctagcaaatcatacacagatattctaaaactctctttaagttttgaaactggtgcaccatgataattccactgaactaattaattgtctctggttggaaaaatctcaaaattgtgaggtacacgatttagaaagaacaaggactataaatacatttaaaatatttttcctaaccctccatactaagatgcaaaaaaataccaatattcatcttctctgaagcatgaatcacctcagaatagcccacgatgtacactaatatgtggaagtaccttcatgggatttaaatatatttacctttcaattatagaattaagatgattttggaaaatggataaagagacattgaaatgtggaaaagttgaactcttacacactcatgcaaaatagttgatttcctctttttggcaatatcccacctgctttgcccctgcaaccctctgcattccttgctgctgccacacatggaggcatagatacatgctctcacacacacacacacacacacaaacacacaaacacatagacacacacagacacatacagacacatacacagacacagacatacagacacagacacacacacagacacatacacagacatatacacacagacacatacacagacacacatacagacacagacacacacacacacacacagacacacacacagacacaaatacagacaatacaaacacacatacagacatataacatacagacacacacacagacacacacacagacacaagtacagacactgcagacacacagacacacatgcagacacagacagacacacacagacacacagacacaaatacagacactacaaacacatacagacatatatacagacacacacagacacacatagacacacacacagacacacagacacaagtacagacactgcagacacacagacacacacgcagatacatacagacacaggcacatacagacacacacatatacacaggcacacacagacacacacagacacacacagacacacacagacacacagacacatatggagacacacatacagacacacatgcacacacagacacacagacatatacacagacatacagacacacagacatatacacagacacaggcacacacacatgcacacagacatacagacacagacacatcaggcacacacgtagacacatacacacagatacacacatagacacatacagacacacagacacacatagacacacacagagacacacatacagacacttagacacacctgtgtatgggaaaacaagcccttagtctttccacttcctatttgtcccctgacccttcttctataccgtatactccatttcaaccttccaatgccgtttaccatgttctggatctcccatgccttgtaaatcctgacaacatttgtgtgtcttttgtcctagacctttgggcttcactttctactcactgccaagaaaaagtaattcccgatagtgttcttgttgggggtaaaaagacattcttatgtggtatctctcaggcaccaaatgtacaccttctttgctctcttcagttcacaccacatagacaagcctataaagaattccttctaggaggttatttgacatctattgaattggttttgggggctcagccaaaaataagataacggaaaaattttatttcataccctattatatagtaaatattgtccagatttaataaacgatgtttctattctttgcaagtagaattatttatcagtaaatcctaagtggctttttaaaaatgactagagtttcctggagactaaagctttcacacaagtttaattttaaagcttttcattattttctttgtcttcattagtctttaagcagcaagttctcattataaactaaaccatgcaaagcgtgtaatatacaagacactcctcccgctcccttgcagccggaggcatccatgaacttagtaaagattgtttcagcagaaatgcaaaaagagtccatttttggcctttggctgcaaaaaagtcccttgaatcctcccaattttttttcagcactttcattggttaattcctactcgttaaaaaaaattacttgaggtaagactgctatacaaaaagccatacatagttaatgtgtacaacttaatgagtttggagattagtatatacccatgaaaccatcaccacaatctatggtacaaacctattcgtcacctccgaaagtttccatctaccctcttcatttattattattatatttttggtgataagaatccttaacatgaaaaatactcttagtaggtttgtaagtatacaatacaatattgttaggttatgcaacataaaaaatactactcattttttatcacttggctctggtctcatctctccataatgcctttgccagtttctactaagttctcctattttgacttgatagtattaatgcatacccttatctcggtacttcatatgcaccttgaaattatccgtgttacctctttctcagtccttacaatgttctcggaaggaaccatgtcttactcttctttgttacccctcttccaaagtgcctatcacatagtaggtgctcaataaatgtttattgaatagagagaaataggtaagattaggatccatttctgatcacattttacaagcaacaaaactaacgctctccaggaatgggcaaactatttcagtaaagggccagagagtaaatatgttatgctttgttggccatctggactctttcacaactacttaactctgctgttgtagcaggacagcagccatagacaatctgtaaatgactgggtgcggctgtgttccaatgaaactttatttacaaaacagatggcacacagatttgcttctaaggctctagtttgcagcttctcctctactaaactaagagtggtttactgacttagtttcacatctagagtatatttgtgtatggcaaaactcaaagtctttttacatagttgaatgatagtatattgtggtggaatagtaatctgctcaatagtttgctagtggtctaaagatctgatgttcaatcaaagatgtgtaatttactactaagaggaagcaagttaagcctcactaattctaatgtacttgtgagtggaaagatacaatgaatatcatgttaagaaaatagtacacgtttaagaacaatctgttcccctatggtctcctaggtcatcaagagaatggactctttaatggacaagaattatgtgctcagtaaaatggtaatattggctctgcctgtcaaaggaagcgttcattattcacaggtgtatatttatcagcatcttcctgagttgatgcctgtttcccaaccatttcttggcattaaagacttcctctggtaggtctatctcctcacagggctccatgtggtccaggctggatctttgcatatatggcttttcccaccaggatgtgggggtgttagaggatagattccaagatctccaaggtcccaagcagtcctcaaatttattagctattatctcttttcaaatgcatcttttccatgcgagccccttttggcttgaaacattatctaagtttaaattagctgtttcttctctgacctcaagttgctgcaacacatatggcaggattatcttggctattaatctgatctctgtgtaattccctctccttctgtttcttaccttcagtgaatccaggggcacccgtaaactctaatcacacattgatctaagcatttcagatacttgcttgtaaagactacctgaacctggggctgagactgtgaggagaagatggaagaggggtgattgggatatgagagaaaagtgtggaggcaacagatttttcggagtgaagccaggaagtagaaggaggaccaggaagtagaaggaggaccgggaaatggaaggagtgccaggaagtggaaggagtcaatgccacactgtgcttgaaatcaacttgccctcagtgactcaatgcccgtggacaacacaccatctaaaagtgttgggtccttatttgtcccctgaacagaaggtaggcttcttggttgccttgtcagggcagaaagcgtggaagaaaaacatggtatcctggcctacatgcagctgatcagaacagctgggaatttccctgtgagatggaacaactctggacctaccactgctgttacccgcactgcttcgcctttaatggttgttatttctcatgggttagtcttgtttttagttactattttatgaagaaattccttcctctcaaggtagatagaataagatcaacctcacggagttattgtggggataaaataagaggacgtgtgggccgggtgcggtgggctcacgtctgtaatccctgtactttgggaggctgaggcgggtggagcacttgacgtcaggaattcgagaccagtctggccaacatggcgaaacctcgtctctgctaaaaatacaaaaattagctgggcatggtggtgcacaccagtaatcccagctatttgggaggctaaggcaggagaatttcttgaacctaggaggcagaggctgcagtgagccaagattgagtctctgcactccagcctgggtgacagagcaagactctgtctccaaaaaaaaaaaaaaaaaagcaagtatggaatgcctctgaaattattatgatattccaaaataaagaattgttatatgttaaaagctccctgaggatcaagttttggactcctctcatctcacgtaatgactcatatgacagcatatcatcaggatatggtttatgagattttcctggaattacatcatattgatgacacatttatgcgcctttgcaattacaaaattcctcctatgttgaatgttgttattctcccctcatgattcagttcaaatgccttcttctctttaacgcctttgtcaacatcccacttcctccagtctccccagtgctctgctcataattctcctatccacatcacattgtgtaatgattgtttatttacatgtctgattatcctgctagtttgtgagcacttggagaagagaaaatgcacagcctatattttattcatgtctgtatgcccaacgtgtgcaccaactgacagcataagtgctccatgtgtattcaatatttcctaaatgtaaagttgagagtagtccttcagctttgggattttgttgacgttctcagtgaaacccaggtttggaactctaacaaatatatttgaatatttctcgggcctataaatgcagcttggaactaaagacatctggtctactataaaaatcttctgaatggtctctattcctctattcatgtttcctttcaatcattttccaattcctgccaaagagaatattccaaaacaaatctgtttattactttttaattaaaagtcttcaaagtcttccccttgctaaaggataaaattttttttagggtggcatccaagaccttacttaatttaatcctctcgatcttccatgacttatctcttgatgcatcttctccattctcccctcagtcccccaccaatacacacaactacctcacaaccctgcactttccaccccacctacctgctttatagatgctgaattacaagtaattatctaaatggaccacactgcaggaacttctgtagccattttccatcattgtcctgttctttcattgttgtttctatttctttttttatctccctaattatttaaaccatattttacagacttgttacatttactgactctcatggtggtggagatggattttttcctagtgtgcctgtgtgtgggtgagttttgttttatttgcttattttattgtgagatcattttcagcaggggttgattcgcttcccactcccaggtagtagaagtaccagttttgccagtttcctagtggttttatgggtcctagaccagctctatgttaatgtcccagcttgggattttgatagcatggggacaatataaattggagccttacatgcttgtgtgccttaggtttgcaatttctcgttttttccctactgagtcgcgggtagatggcaaacttccttgctacctctctaggcttttgggtggagtatttctagttcctttttaacagatgggcctggctaaatgtagaggattcagctctagctctccatgtcagatctcacatgggtcagtgtccttaccctcttcctgcctggacattaaaactcagctgtattgctaagcaggcctgacaaccccgtgagaggctgttgcatcagctctatttactagcctgtatttaatttccctcttccttgcttaaacctatgggtttgtttctgttttcttttttcaagctcaatcatttttccttacgctgttttatctagcatgtgggagaattggtgtcagtgtagtccaataggttgttggagggcctctgtgttacctgctgtggttattcccacgttctcctttacatggaagactctgtcatcaaaccaacccagactgcagggcaaccttgctcttcatactcagccgagcatccccttctctattgaacttttttaaacctttctccagattagaattagtctctccctcactggtacttccaccacacactgtttagttttaaaccgtaagacccgtgacgctgatgtgcttacattgtgttcatgagtcctttttccttcttgaagattatattttatttatctttgtgtccttagggtcctgcgctttgcagggtccataacaggtgtttaatacaagccaaataatggatgaatgagtgaatacataaaatgggtggataataagaaatgacagaatagtagcaatagtagaatttcatagttcccctaggtcaggcatggtggtgtgcacctgtagtccttgctatccagtaggctgaggcaggaggatcacatgaacccaggagtgccaggctggaataaactatgattacgccactgcactccagcctgacaacagagtgagaccctaaaaagaagagagaaaagttcctctctctctgtctttatgctgtgtttctaggccacatctataaataaattaagaaagtcaaatttaaactatcttatcctgaaaagaagtgaaatgtaagatgtttattgaaactagcagcgatcacatctagtgccccccatgtgccaggcacattaaattcacatatctactttttacagcaacattttgatgtaggtgctatgaatattctttttacacgtgagggaaatgagtcaccaaaaggttgaataacttgaccaaactcaaaaatgatagagctgggatttgagctcaggtagtctggctccagagtctgtatttttaaccataatattagataacctatcagtactaacgaagaagacagaaggaagtttctgggtccatttttttaaaggaattatttgtgagtttaaagtgaatcattattttctgatgaatattcaggtactttttagaaccctgccatgcgggaagataaaagtctcactcagtaaaatacctctaaatttaactgataggtttaaaaatccttccacaattgaacctagatttcagatgttgttatttaaacacctttctttctgtttccttccttattcacaggaaaaaaaaaaaaaaagaacaaatacaaccacctccttttggtcttcctagaaatataagttgaagccttattagaaatcatttggtatacatcccttttccttaaaatccggaaagcaccacgaatattttgaatttattttattttatttttgagatgtaatctcactctgtcacccaggctggagtgcagtggcacaatcttggctcactgcaacctccacctctcacgttcaagcaattgtctcacctcagcctcccaagtagctgggactacaggctcccgccaccacacccagctaatttttgtatttttagcagacgcaaggtttcaccatgttagtcagggcggtcttgaactcctgacctcaagtgatccacctgcctgggcctcccaaagttctgggattgcagacgtgagccactgggccaggctattttggatatactgatagaaaatcaccctgctcattcattctccttatcaccgactgagaagtaagaagcaagacatactggatggagcaaagcaacaggctccatctgcccagtcattttgactgtcatactgcctgcaggtggtaaccacaatgcttatacttgtggatgcagaggcccaataattcctgcattgcaaatatgatctcatctcctatcgaagctcctttaatggaattttgtggagaagtgataaccttccctgaatgtaagagtgggcgaaagaatctcaaaccacaagacacattgaccataagcaaaatgggaatgtgtttttggagcagcagaaactttttacttaggattattaaagaatatgctaaagaaagataagcaacttgagcggttactaaatataccaagcatgcatggggctgagatatgtggggttatgtgcagctgagcaaacaaaatgactatttttgtagggaccctgagtgtgtggcgctttgggtttgatgacgcacctcactatttaaggaatgctggagaattatcctatctgaagtccagaacagatttttctcttcgagagaaaattagttttttaatgtttgaatggacattgagtaaaatgtatcatgaaaatatctaataatttaccatgccaccaagatggcacagcctcagagccatgctgagatcagaagaaaattgaaataattggtagagtacaaagggcttcatttttcttttcctttttggcaataaactggctccattacagtgttagtgagtttcagaaaatggatggttattgacatgagattacttgtgaagcatagtgtagatcattcagttgaaaaggattgtgtttttttctttttaagcccaaagtactatatttaggtcaatatttaaacacatggtagaacttattaaaagtagtaaaattgaaatgtttgtcacttaatgaatgattggcaaccttgcttaagatatcttggccacgtgtgggctcataagcaagatccttaaggtatttaaaaggaaattaggctctctgctcctccggtttggcagccacattttctcatgcagtgtcagccgtgtccctgagacaccatggtggaagtgcaggtcagactaaacggatttggccatattgagtgcctggtcaccaaggctgcttttaactttgggaagcagatattgttgtcatcaatgatcctttcattgacctcaactacatgctctgcatattccagtatgattccatggcattggcaaggctgagaatgggaaacttgtcatcagtggaaatcctatcaccgtgttcccggaggaagatcccaccaaaagcaaatggggtgatgccagtgctcattatgttggggagcccactggcatcttcactcccactcccatggagaaggctggggcatactgagagtagggagtcaaaatggtcatcatctctgccctgtctgttgatgaccccatgttcgtgatgggggtgaaccatgagaagttcaaaaacagcctcaagatcatcagcgatgcctcctgtaccaccaacttcttcgcacccctggtcaaggtcatccatgccaactttggcatcatgacttatgaccacagtccatgccatcactgccacctacaagaccagggaatggcccctctgggaaacagtggtgcgacagccgcgggactctccagaacatcatctgtgcatctactggtgctgcatctaccaagctgaacaggaagctcactggcatgtcctcaccaccaatatgtcggtcatggacctgacctgccatctggagaaacctgccaaatatgattacatcaagaaggtggtgatgcaggcattggagggccccttcaagggcatcttgggctacactgagcaccaggctgtctcctccaactttaacagtgacatttactcttccactttccatgctggatcagcattgcccccaacaaccactttttcaagttcatatcctggtatgatagtgaatttggctacagcaatagggtggtaggcctcaaaggagtaaggcccccagactgccagccccagcgagagcacgagagggaaaagagaggccctcagctgctggggagtccatgccacacccagtcccccatgacagtgagaatctccctgcctcactggttccatggcaaacaccctgaagtgggaggggcctagggagccccaccttgtgtaccatcaataaagtctcctgtactcaaaaaaagaaaagaaaagaaattatactgaaagatagtatttaataaagagttcagatgttttatgttcatatgtgaatcagtatcaggcaatggatttatcattttggaaattaagctcccttgtaaaaaatatctgagttgtttattgagttacaggcactttcttataaagctccagttgttgcttttctcagagaactgggaagcccctttcaattttgttgtgttctgtgaacagctttccaccccgaagactggaaaatctcttttctaaccatgggagaaaaactgaagcagaaacagcaagaaatacaggtattttgacaaaaggattttctcatcccagtgctttcttactgcctgaaattctagtagttaacaattcttcaagagtcagatacttgtcacagtgtgatatggtttgggtctgtgtccccacccaaatcttaccttgaattataatctgaattgtaattcccacatgttgaaggagggagctagtgggagatgattggattatgggggcggtttccaccatgctgtactcatgatagtgagtgagttctcatgagatctgacggttttataagtggcagtttcccctgcgtgctcctctctttcctgccaccgtgtaatacataccttgcttccccttccccttctgccatgattgtaagtttcctgaggcctttccagccatgaggaactgtgagtcaattcaacctcttttgtttataaattactcagtctcaggtagtatctttgtagcactgtgagaacggactaatatacaatgactcagaaagaaaaagacatcttttgactttggagggatatatttttagggtgagatgatataaatggggatctcacggtaccaggatagttgacctcagttgaccaaagagcctaagctgaaaaacaaaaatagtagcttatttttaaaaatagctaatgctatagaggaaagcagtaagtaacttggagaaaaggcagagaaagcacaaacacggtcaacatctggagaagcttgaacctcatatggcagatcataattgtaacacaattgcttattttataccctgaaaattttcagttctaaatgaaatcttgctgggtaagaatatttttcaatgactattttaaagaaaagcaattctgccagttttgtggtatatggttattaaagagttaaagagcaacagttaagtcatattgttaatactgtggcatagaaaataatctaatcatgtcctttgcccatttctaaattggattaattttactaatatattttatttaacccaatatatataaatgtttcatcatgtaatcaacataaaatgttaatgagatttttacctttttattcataaagtcttcaaaattcaggatgtattttatattcggaatgaaactcagtttaaagtggtcacatttcaagtgctcaaaacacagatgtagctgtcatattgaacagcacactgcagatagttctcatttctagctgggtgtttggctttgcagaagtctgaggtccgtatggttttttttctccttgtaggtgattagctttctgatacctgaacaattatttttcattcttacaattcaataacttaacaaagatacatatcaaagaggtccatacttaattttcatgttcattcactgtgccaattgagttctcatttcaggactgttacttattttgtgatatatctttgtaatacttttcttattccactgttgagttattttttcttctgagacatcagttaacatttgttgggctctctatttttgtcctccatatctagtagtttctttatgattctttaagcacctcatgttatttgcattactgtaattatcacaatctttttctaaatgtaagtatattgattttgttttctgctcttttgatcttatttaacttgtgtttttagcttgcttaattttgatgacattattttggttcttatttcctgtttcatactacagcattctttatattctaatctttttgctctcattttgtcaaattcaagtggctattgtaagcttgtcctattactcaaagcttttttgaaaatgttccttcttactgcagtcgagtcatataaatgaataaacaacaaaaatatacaagagaatttttttaaaaagaaaactaaagaaaatgttccttctgtttcttgtttgctttagttttttttcccttaagattaggttgtttatttggtatctagctaatgttggtcttgtaaaataaagtgggaagtgtttcctcctcttctaaggaagagcttatgtggaatttgtgctatttcttttttaaatgtttggtagaactgattggtgaaataatttgtccaagagatacctttttcagatgtttaaactatcaattcaatttctttaatagttttaggactatccaggttatctatttcatcttaggtaagctttggtatttattgattttggagaaattggtccattttatctcagttgtcaaatgtatgtgtatagaattacttgtagccattatatattatctttttttcacatccatggggtttgtagtcatatattctctttcactcctgatcttgccaagtcagttccaaataatagaaattttcagttgatagaattccaagaaaattagattttatctcaaagaattccaagaaaattagattttatctcaaagtaaaacaaaataagacctctagatcttgaaatcgatgtatctcaagttaatatgttcaaaatgaatttcatcatctgttttccaattccttttcctgttacatacctttctttttcaaatgtcacttatccaagacaaaaactggggtacttcactatcccctttccctaatcccccaactggtgtgttagttttgaaagtttgcctttttaatatctctaggaggcattccattttctctagcctatctgcactgcacttgttcagattccctttacttctttccaggattatttcagaagcctctaaatgatttttccgcctttggctttagcttccttctaaactattctctatgttgtagccaagccatatttttaaagtatgattctaggaatattatctacccctcactatcatggaaatcctttagagtttgccttagtctttcaggctgctataacaaaaatccataaacttaggtggcttataaacaataaacatttgtttcacacagttctggagcctgagaagtccacgatcaagatgccaatacattcagtgtctggggagggtctatttctggttcatagaagacgtcctctagctgtgtcctcacatggtggaaggctcaagctagctctctgaagcctcttttacaagggcactcatccaattaatgaagtctctgccctcatgacctaatcactccacaaaaggtcacacttcctaatatcatcatgttgggggttaggatttcaccatatgaattttgggggacacaaacagaacatagcagaggccctctgcagtggttgagatagagaataaactcccaggcacatttgctctttctgtgtttttgtttgtttatttgtttgtttgtttgtgatcagatccctgccagtgtccattttcacatgttgacactctcttgtttttgtactccagccattgcgtttatttcaccaagcttttattcatctctgtgactttacacaaattgttctttatgcttggggtgctctcccttgtcacagctcctctcctgtctaagacatgcttagaagattcaagaataagctcctttggtggcctccctgaccttcctcatctcagtcccctgtgtactctcaaaatatcctgtacacgctgtttgacacttacattttacttgtctaagcccgcttcaggcagagactgtatctttttcatatttatcttggtacatagtaagtactcaataattattgagtgaagttcaaatcttttgcattaagggatatgaaattccaactggaaaagttaacaattgtaatgtgagaataatatctttaattaattttgtttgcttgcatattttcattttgtccttatagtaactctgtgaattaacaggaaccctcaattgaatagagaaacaaagtgaggcttgggagggttggtaattttcccaaagtaactcagctaataagtggcagaaccaggagtctggtatgtggtcttaatttaaagctgttttcttcccactctaacatcaagcccagaataggagaataaagggtaagagaacctgaaggtgttttaaatgtgctcatacccccagtattaggtaaattacttttcagggtataaaggtctcctggatgtgttatcagagacagtagggaactgcagagatgaaagaagcttggaaatgtgcaaatatttaaaaagtgtatctgagaaatccttttctcagaattttttattagctagatcgttgttgaacatttggaatagaagatggcaatcaatcaggactgacacacgtttccttcgaatagatcaggtaaagtaaactccaattttctttctattctaagtttcctagattgtatgatcacaataaaatagcagacaaaatgttcacttatttgttctgggaccacccctcccccccaccaccagttgtcatcattgggccaaaatccacacagaataagataaagtaatcagcaaattcaaatgaattagcaaggaccagtctcaagactgtctacaaaaagaatgatcagatcttaactctaagtcctcaaaggcttcatcttccatgacccaagtgggtggtctccatctctattatcattgtatggtatctactgcatcctataatgtacttatcctttcatgcaccctaaacatttctacaatatcctagcagagtgaagaggcatattgcctagaaacatgggagttttcaaagggataaggatttcttcattgtcatgaccttttgtacatgatgtacatgatttggtggtgtgtcccactatctgggccttgtggtttccttacagacagtttctgctgttgtttttgtggttggttcctccttcagccttcttatccgttagatatctgtgcagttcttcatttttcttcataaaagtaacaataaacagcacaaatgaacccctggcaacctttattattgtattatacatgaataaagcctattttaataatcttatgagcgagataaaagcatgtgggatggctacctctgatgttccagatgattttttaagtagttggacagtcacacaaaaagggtataaaccaagggaggtcaaccttaaaagaagtttctttgttctttgacttctgtgaaaatgttatcggagacttgaatataagcataaaagccacatttatcaaatttaaaaatttataatgcaaaaagctgccagcttagcgaaaagaactcttttttttttctttttttgctgctagttgaagatgaaaattctaagtaatctcaccaggttggacaactggctatgaaatggcatgaaatatgtaagttactattgtcagctttaaaagagcaaatctgcaatgataagatataagatctgaaaatctttgtggcagcagcttttgtaaaaacgaaaataagacataaacaaataaattaattacaaatttgctgtgagaccaaaataccacacagcccccaaaagctgagatagtcactgcagatattgaagatctgcattctaaaccacatgttttatccccaatgttcagctcaatgtattgtgcttggtagattcttaattattatttgttcagtaacaaatataatgatcaggtctttgcaggagtattaaattaaaatttgtctgttacactttaatggtcagttgttaacctggagtgcacacaaataatgatagatcagcaaggagggtctaaaaaccacatactaggaagtccaatggaagaattaggcgtgtacagaagagaaggttaatttattaagagaccggctattaggccgggcgcggtggctcacgcctgtaatcccagcactttgggaggccgaggcgggtggatcatgaggtcaggagatcgagaccatcctggctaacaaggtgaaaccccgtctctactaaaaatacaaaaaattagccgggcgcggtggcgggcacctgtagtcccagctactcgggaggctgaggcaggagaatggcgtgaacccgggaagcggagcttgcagtgagccgagattgcgccactgcagtccgcagtccgacctgggcgacagagcgagactccgtctcaaaaaaaaaaaaaaaaaaaaaaaaaaaaaaaaaaaaagggggccggctattttattatagattgtcttattctgtcccaagggaagtattctaattgatgttatagggaggcaggtttaaactcagtattaagaagagctttctataattaataaaagacaatgatatggacttgtattagtttgttgtcacacagctataaagagctacccgagactgggtaatttataaagaaaggagttttaattgacttacagttccacatagctggggaggcctcaggaaacttataatcatggcagaaggtaaaggagaagcaagcacctccttcacaaggcagcaggagagagagagaacaaggtgggaagtgccacactttaaaccatcagatctcgtgagaactcactgtcatgaaaatagcagagggaaacccgcccccatgatccaaacacttctcaccaggttcctcccctgacatgtagggattataatttcagatgagatttggggacgggagcacagagccaaaccatatcaggactattgcatgaccatctattaggcacgttgtagggaaaatttctatctatatatttggtgtagtgatttagcttggattgtctttccaactcaaagactacattgggtagtaagagctagtctaatttttttaaaaaataataaatatctgggctatatgcacttttttcattatcaacaaaactactaaaatatcttttcacagattaagcctaacaatggggtttctaattctttcttactatattacagttttgttttttacagtttgttagagatcactagacagttactaatatccattattttgtcaacatgtagctatctctgttggtttttaaaatgcttgaatattttctgaatttaagaagtgattttacagtatttgctgtatttacagtatttgctgattcagatcattatgattatttataaagccaatcatatgtttctgtttctgtgtattttacaatttttttcaatatgtaagtgaggactgagaattaagaagttttttggaaaatgctagtttttattagatggtgcccagaatatctcaataatgaaaagttgagtatgttggagttaaaccaattgcctgccctcaatgcagtgcttatttcagtttgctgacagcactagtcagcagtttgctgttctgagtgtttactaccacatccctgacatattctaccctggaatcccaggactctgtgttttctggttacgctcggcctctctggcttcttcacagctgccgctccctcattctcatcttaactgtggccacacccaaaggaaggatttgtaattctcttctttgcaattttctgcttagaggtctcctctgcttccatgccttaaatggagaagccccagttcttcacccatggccctgccatgaatctcccagctctgtgtgaaggctctccattgaaattaacaggtctaacatccacctcatcacgtttctcttcacaagaagactttgggatcttctctgtttctgccagtgattcaacctttctctcagtcactaaagctcagatatattgtaaccacccagtgggttcaccttgcctgctgcctagacagaatctatcaagacaggggaattgcaatagagaaagaataatttacacggagccggctgtgtgggggaccagagtttcattattactcaaatcagtcttcctgagcatttggggatcacaggtctttttttttttttttgagatggagtctcattctgttgccaggctggagtgcagtggcgcgatctcagctcactgcaacctctgcctcccaggttcaagtgattctcctgcctcagcctctcgagtagctgggaccacaggtgcctgccaccatgcccagctaatttttgtatttctagtagagacggggtttcacatgttatccaggatggtctcgatctcttgaccttgtgatctgcctgtctcagcctcccaaagtgcttggattacaggcgtgagccactgggcctggcccagggtgtttaaggataacttggtgggtgggggaagaccagtgaattgagagtgctgcttggttgggtcagagatgaaatcatggcaagttgaagctgtcctcttgtgctgagtcaattcctgggtgggggccacaagatcaggtgagccagtttatcagtctgggtggtgccagctgatccatcaaaatatctgcaaaatatttcaagcactaatcttatgagcagtttagggagggtcagaatcctgtagcctccagctgcgtaagtcctaaaacataatttcaaatcttgtggctaattggtcctataaaggcagtctagtccccaggcaagaaggaggcttgttttgggaaagggctgttatggtctttgttgtaaactataaattcctcccaaagttagctcggtctatgcccaggaagggacaaggacagcttaaaggttagaaggaagatggagttggttaggtcagatctctttcactgtctcagtcataattttgcaaaggcagtttcaatatcacagttcctctcctccctgcttagggagacagtgtcccataattgttaagagcacaccctctgactcaagccatctaggttcaaatcctagcccttcccttctccagttgccgaactcgaacaagtattgtagcctcttcaagccccatttttcatatctgtaaagcggagatcgtaacaaactgtacatgtcgatgatgtccacagagttggatcaagggttacgaatctgacagcccaaacctccagactggctgtgctattatttcagttattctgacatggctctgatgcaatgtggacgtcaacaaagcattaaaagtgagagacagattagtaagcaactccctaagggtggatttttaaatatgcactaaaattgtggagaagttaatatactatattagttcactagggctgccataaaaaagtgccagaaggacgctaggtgactcagaaaacaaaaatttgttttctcacagttctggaagctgtgaatctaagatcaatgtgtcagcaggttgacttctgaggcccctctccctggcttgtagatctgtgacttcagattgtcttccttctgtgtgtctgtgtcctaatcttataaggacaccagtcagattacattaggacccatgccaataacctcattttaccttaattacctctttaaagcctttatgtctgttaaagcaaactatagcctgagaaggactccctacttctatatttgagtccttgcggatgaaccgtaacctaacttaataggcagataaaattgaaaacctaacttagtagtatgcacctgtaacaatagctaaatcctagccaatcccagcagccatatttcaaccattcatacactgcttagtgctcaaactgtgttcaaataaggcaaacgccaacctctaaccaatccagccgttctgtacctcacttccaatttctgaacgtcatttctctttttttttttggtctataaatcttccaccacatggctgcgctggagtctttgtgaatctgctgtgattctgggggctgtctgatttgtgaaacgttcattgctcaattaaactcctttaaatttaaaccgactgaagtttttcttttatcatgtcccaaaacaggaacattctgaggtactagaggtttggagttcaacatatacatttggcggaggttgcaggaagacaattcagcccatagcatgtacctacctaaggtcttaactggtaaacaaacaaacaaaaaaccaacctagttatagttttaaatttgtttctattttatttcccatgaggtaatctaaaagaacctggggaatccaggtgcttttcaaagcagtacttgtatggtgtttcatcattacctctcagcgggagggaaatgaaactcagacgggcccatttggtttctatgataccagctttcctcacctttcttggggagagtgattttgaaactatgggctacaaaagacttttggattatgtgtgagctatgctctctctctgggactcctactatgctttgtgattgtgaaaataagtgattcaaaatctaagctgttggaactctaaattattttgagccataaggaaatgtgaattatggggcctgagtcacaagacaggcagctgtaaactaggcagctgtgaactttttgtaatatttttgattgtctgaattgtcttttcccttacctacattattttgtaaaatgttgtgaatggttgtaggacgtgcgacaggtgtagctcacctgcttggtcgccccaaagctcaaaggaggagcatgcagacaggcaggtgcagaggccagtacaagcacttttgggctcctgtcccacggcagagtctaggggtgggtctctgtgtcactcgaagcccatgtaggcatgtattacaaagctctttcagatttgttgtctgcagacggcttgtgtgttaatcagcttaacggaccctctgccttattgtgagggcagggggccagcgtgacaactttctttatcccaagctcttgtccagtgtcctgaaagaatcagatcacacatgggcttgaaggatgagtgcaaggtttcattgagtggtggaggtggctctcagtgagatggatggggaggcagaagtggggatggagtgggaaggtggtctttccctggagtcgggcatccagcggcccaactcttctccagccacccctggccaagctcccctatgagtccagacatccttccttttctctctttctctgctgcattgttccactgtcactggtctgctggttcactggtccactggtctgctggtcttgatgtccagcttcttgtgtatgtgcccgctaaggtcttgggtttgtatgggggcaggatggggggtgcatggcaggccaaaaggcaaattttggccatgaaaacagaaatgcctgtcctcctttagggctgccggtcttcaggcttgagggtgggccgtttgttggggaaccgcccccttctacccagtatttccctgtttcctgtccatatcagtgaaggatgccagaggagaccccttccctcttactattgactttcattatagattaacctctttcttctcacacaaaaactttatggccatctcaatgcctcaagatggaatgttaagcacactcttttaaaatcaaaaggaaatgaaaaggagcgataaagaaaagaaaacaagctgcatggaaaagaaaagaaaagaaactgattaatttgttgtaactcataaactggccctgtattgaaaatgttgtaatcttgttaaatttctttgctttttcctatataaaagagaatttagcttttaacttcagagcactacccccatttctctgggacagagcatccagaaatggccattcccagctttttgcttgaataaactctctaaaattggaatctgaccctttagattatttcaggttgacatgatgaggagttggctataaagtcactgctctggcaaagactgaatttctctcctagtatcaatccaacaccactgttgccctgatacatactgcattactgtggaaggtttaaaatcaatctacttagtattttcccttttgtagaagtggattttaattatttcaaggatcaggtttatggtgtggggtgggggctccagggatgtggggagggtagcatcacaaggaattttcctccaaaatgagtgtaagctcaagtcctctcttgtgtctgctttgccttactttgcagggaaagaacccaagttgcatgcaacttcccatctaacttctcattctctcttaattttcaaacttgttttcatccctattaatagccaggtcatagaatcattttcagaaacatttcaggtgcttcaggatttttgaaaccctttagttcgcatggtttgagtgtgtcacaggttagtaaaccctcaaagctatgctgtcatggttattgtgtggtttatgccgagagaaactggtcatagtctgccccaagtagcaattaatggggaccctgaggggcagtcgggagaagtgactaaatcaatccagcaagctctagagaagcatttcctcttgagaagttcactattttgtgaaaatcaaacgcaaccaaatgccaggggaaagaacatctcccactggagcttgacaatatttgtagaattaagtgaagttgtgtttctggtggttgaaagtgtctgtttgtgatctcatgtattctattttgctgaataggtacttaggatctgatttgggaggaaatgaaagcatgaccactggcaagagtcagaaagagctacaggcattggcattttctgtctatttctaagatctttttgtcaatccggtgtttggaaacaactttcagtctacctgcaggcattttaaatgagtcctttaccttgtttctcataggaaaacttcatttagctgcatccactccaggcaagttctttgttttcactacttgtcagtgttttttcttaatcacttccctcatcttccttcctctctgagcccctccttttcaacctcctccagttccctacccccagcccctaatggagtgtgatgtattatacttacgctttatgaaattctcattagggaggatcctgtccattgacaataatggttgacttgcagaattctcaaatatgaagtttcaatggtttgtacatcacatattgattttctttccttccacatgtggataatatccacacaacagtatctcacacccctattctttgtgaaaacattatgtggaaaagtcgatgtcttgggtggatcaattgtcaataacaacagtgtttcggatacataagcccttcctgttgtagtcacaccttctctctgactttaggggctcctacaaggtccttgtatttatttcagaataggctagtgtagagacttaaggaagagctctcggcatcagtcaggaattcatcggtcaggccctgagccctgcctctgccatgctgtcattgactttggccttaggtgggtcattttgcatctctgggcccagtttccccacccttaaaagaagaagactggcctgtcaggagttctagcatccttgtgataggtcatccttgttggacaatccttgttttgttcccattaagctttacttgccagtgagttccttttcgtccttttgtagattccgtaagacccagagggtgagtctagccaaagagggaatcaagctgggctagccaaagaatgtatcctctttgctcctaatcttctgaagaataagtcactccagaggcaggaggaaccatctctgattgagccagtgagcatgtggctggctgtccttatgagccccaggccccaccatcagagctaagcttgccaaggaatgcggtgttccttccatagctctgcttcagatctgcttcccagccctgtctgtccttcttggattaggcagcagcattctaggaacaaatcccctttgctcagccatgcatcactgccttccaactcattttctgaatctcacagttcttgtcccctccctgctggtcctggcaagactgaatttgtcaggccttgttgagttcctgtagcctggtgcatgtggttaggacctaggttgcttttggctgctctagatatttttaagtacttttaattgattggaaaaacatgctaactttgagttttaaagtatttgtaattatacccccccaaggccactgacttagctgtggggttgtcaaagagccattaataagcaaattaaaaggaagaggtggagccgtaaaagcagttgcagaactagaagccaaaagcagcactttctgtttagtgactgtaatagccctgactgtgtgtggactcctgagatggaggacaagtgaacttactatgtgtttgaaaaaatggttgcagtggggcaaatataaacctatgctgtgccacactccttcaaggctgatctatttcatggccacttccagaattgtgcaacaggtgacctccaggataactatggcttatcttacagcaacgtagttcatctaggatagaaaattgtacctttatccctggtaccttctgactacagatgacatagtgcttgaaccaatcctatctaatctctttccactcatttttagaataaaagccaagcctctcatggattgggatgcccttagagaaagaatgcttatttcaatgcagttgtgttactgcttcgtggtgtcatatatattagtcagtttcactgcaataatatatagtctccaaatctcaggggctcacgccaacaaattttcatttcccacttgcattacatagtgatggtcatgcactgattgctacagttctgctcccagtgtcttctctttcctggaatcagaaacatagccatgtatagttgggacttgctatttttgtttcataactgcatttttgtacccagtagctgtctgcactccttccccttccctgtcctcttcccagcctctagtaaccatcattttactctttacctccatgagttcaattgttttgattcctaagtctcacatatgagtgagaacctgcgaaatttatctttctgtgcctggctttgggactgctgtttttgtggcagaaagaaaaacagagtattggctggaaaatgtcatgcttcaaagtgtttgcttgaactggcacactgtcacctctgcttacatttcactggcccagacacctcatgttgccaagcctgaaaacatggcagagaaatattctccacgtatggagaggcaccacaagtcattcggaaatgggttggatgtataatcacttacagggaagaaagccaatatggggaataacagtcccatcgatcatcaggttcacatgctagacaggtaacttcatgagaaaggccatgctctggacagaagcctctgatccataaatctgtctttcctatccttgagtgctgttatgtaaggaagacaggggagaatagctctttgatttttatatttgggaaggcctgtgccaagattccttttatgagatgggatctgtttttgttctaacacccttcaggttcacttattcctgccttagacggtgtctcctcttctgcaaattgctcgatttgtttggcttcatcttttgattgcagttgatggctttggcgttaataaatgttttgctcttctttcagctgactctcaaatgtgctcttgcagatgcaaaatcactgtggtttggcatcagaccagaagatgtaggaatcagtatcagcagagatgtgggcttcttggtccaaggcagattcaagaagtagaagattacaggagaagagctagacataggaataaatgcatctatttccttgttttaagagagactataaaagttaacatttttttcttcactttccacaggtgaatcttttttggaccattttgctgttttagcagtgtctttctcatggaacatatagcttagatggtgaaattatttttcttaactttcagactttctggaaagtcaaggaggatgggtgtttctgatctgtgacaacaatgaattttttataataacttgagataggaaaaaaatctgattgcagtatataataatcagaaaatttcctctttgcagaaatcaaaattacttccagcatatataaaacaatctttgctaataaagtaatacaaaccctccagttattatttatttttattggcttttttgtaaaagtatagatatttataatacataatatcattaattttttttccatatctacatggttattggcacccaaagcagtggtcttttattgggaacagaattgcatgggaacatctgcttaaaccccttgccttcaccatccggttttgcatttgtcagtttccttgtctgatctcctacagggacttgagatttgagagaagttcaatttccgccattttctgttccctctctccacattttgcacaatgtcttttgtggctttttttgtttttgtttttgtttttgtttttgtttttttttgaggcagagtctccctctgtcacccaggctggagtgcagtggcactatctgagctcactgcagcctctgcttcctgggttgaagcaattctcctgcctcagcctcccaagtagctgggattacaggtgcctgccaccacccccagctaattttcatatttttagtagagacgaggttttgccatgttggccgggcttgtctcgaactcctgacctcaagtgatctgcctgccttggcctcccaaagtgatgggattacaggtgtgaacctctgcccccggccttttgtggcatttgtattgaatggaatgaataactaagccaatgaatgagcaaaatatacagtcttgttccagaaaacaaaagaacaacaaatgcagaccaggcaatagatagggggaatgcctgcctgccccagtttcccaaccttctttccttggcttttctgccttccatgctgagttacctcatggacctgcagctactgtgccaggactcctggtgtttgctttttctcttccaactccaagcaatgacaatatcaagttttttactccatgttagcactcttagaacccaatattttaaaaattgactaaaattctaagagaaaatgtaaaaagaaaaaaaattacaactcccattcaaaagatgaaaaataacagcctaccactaattgacattttcctgtacgccggacactgtgcaaggtttctacagacatgggaagagggattactctctccattttggaggtgtggagatgatatggtttgactgtgtccccacccaaatctcgtcttgaattgtagcttccataattcccacatgttatggaagggacccggtgggagttaattgaatcctgggggtgatttcccttatactgttcttgtggtagtgaataagtctcacgagatctgatggttttataaggggaaaccccttttgcttggctctcatactctcctgcctgccgccatgtaagatgtgcctttcgccttccgccatgattgtgaggcctccccagccacgtggaactgtgagtccattaaacctcttttttttttttttttttttttaaataaagcaactggtcttgggtatgtctatcagcaggatgaaaatggactaatacaggagccgaggcctggaaagagttttccttgtcctgtgtcccactgctggtcagtggtgaagcttgggatgagaacaatggttatttcattctacaacccatactttgaaaagcaggcattgctaagtaaaataattctagtttatgcagagaagagattgacttagcataaagttccctcttttgaagactcagtgagcagccttgcagctgctgctgtgtaggcctttcacagtcaggttgcctggattttctgcccatgcatctgacagtagctcttctcccagccataggttacttgttttcaaaacaaacacaggcttttctttataagtttttttctggtgctcacctctctcatcccctatacctctcttcaacctaggctcttccaaaaagtacatcaagcaggtgaagtttacacctctaacttcagagaagtggttattggtaccataaaaacccaaagcatggccaggaacagtggctcacacctgtaatcccagcaatttgggaggttgaggtgggcaggtcacctgaggtcaggagttcgacactagcctggcaaacatggtgaaaccccgtctctactaaaaatgcaaaaattagctgggcatggtggcgggtgcctgtaatctcagctactcgggaggctgaggcaggagaatcacttaaacccaggaggcagaggttgcagtgagctgagatggtgccattgcactccagcctgggcaacaagagcgaagctccatttcaaaaaacagacaaaaaacccaaagcttggctggtctgcctcatcttatttcccaatattttccacttagtttccctatgaatctcttagatcctttagtgtcttacttctaccccaccaacaaaaggagtagtgtgtatgaattaggattttacaatataaatatacatttacagtaacatacttataatgaggatgtttttctctaaaaagaactatgctaacatactttatataattgcaatgaatttgtttttcactgtttataacttcttaaaaaatatactgggcatgagaagacctatccaaaagcaggaaaatcttattttaagtgctgcaattgtgtcagttatgtcatgaaatcataaatggtggctatctgtcaaaatgtgctatgtttccttagacataaggaagacaatgaattttcaagataactcactgatgtgtctttgttaagctgacatatttggaagaattcccaaataattttcatggtcagagagattctcattttgcaagctacccctaagcaagaggcactggggactttgcccaaccagtaatattcagatgagttgcagattgtttaagtagctaaatcatgttaatcctctttccatgtatggcagcatttatttaaaattatttattgaatgcattctatgtgccaggcccatttccaagtactggatattcctggtgaacaaatcctacacatattactacctttagggagcttacactctggcattaggcatcaaaacaacacattctggcaaatgaggctggtaacttttaaggattaaatagcttagagttatcagagtgttgaccaggcatggtggctcatgcctgtaatcccaacactttgggaggctgaagtgggcagatcaatggaggtctggaatttgatacaagcctggccaacatggtgaaacccggtctctattaaaaatacaaatattagctgggcgtggtagcaggcacctgtaatcccagctacttgggaggttaaggcaggagaatggcttgaacccgggaggcagaggttgcagtgaactgagatctagccattgctctccagcctgggcaataagagtgaaactctgtttcaaaaaaaaaaattatcagagagtagatttatgtattaagcatctttcaaaaggccttacacagttacagtttacattattaatgtactacatttcttggcaaataatttattgctgttggtcttccagtccccattctataagatacatatgcaaagtcaggaaacaaagtaaacttttcttaaaacagtatgttagttatcttcaaataatatgctttcagttgaagtggatttgctctagatttaaaataatgggcctaattgctgatctagaaaaaagtaacttataaaacatattgagcatccaaaaattctggcagcataggaagcttactatattcattatacttttgaaggggaatggaagttaaagaaatgcagattatgttgtttgaaaattatctgagtccatttgtgttgctataaaggaatatctgtgactgggtaatttataaagaaaagaggtttatttggcgcacacttctgtagcccatacaagaagcatggcaccaacatctgcatctggtgagggtctcaggctgctttcactcatggtggaaggtgaagggaagtcagtgtgtgcagaaatcattcagcaagagaagaagcaagagaggcaggaggtgccaggctctttttaacaatcagctctcacaggaactgatagagcaagaactcactcattaccataaggatagcaccaagccattcatgagaaattcacccctatggcctaaacacgtccccttaggcctcatctccaacactggggatcaaagctcaatgtgaggtttggggagacaaacacccaaaccatagcaaacatataagtgacatactgttaaaagatggatttatcctatgtttctttttcttttttctttctttttttttttgagaaggagccttactctgttgcccagtctggagtgcagtggcatgatcttagctcactgcaacctccacctcccgggttcaagcaattcttctgcttcagcctcctgagtagctgagattacaggcgggcaccacgatgcagaactaatttttgtatttttagtagagatggggttccaccatgttggccaggctgttcaccccagtaactctccccttaaacaattggcagttgtaggaaggagcaaaagatgcacaactgtgcagagaacaagggtagtatcccattacttgttatttaggattccgtggcatgtacttattcttgaataatttactcaaaaaaaaatgggaagcttccacatcttggcgattatatatagtgcagcaggaacatgggaatgtggatatcccctccataaactgacttcctttcttttgggtatatacctagcagtgggattgctggatcgtgttgtagttctatttttaattgtttgtggagcatccatactattctcatagtggctgtggagaataatttacattctaatttagtactaatttatattcccaccaacagcatgcaagggttcctttttctccacttgaataagatctaatatttaatagcacaacagggtgattacagccaacaacaatttattgcacatttaaaaataactaaaagagtataaacgaaatgtttgtaacacaaataaatgataaatgcttgaggtgatggatactcggtttaccctaatgtgattattacacattgtatgcctgtatcaaaatatctcatgtaccccataaatatgtacatctactatgtacccataatttttttaagtaagcactttcagaaaggatgcttctcagaactcacaaacattgcatttttatactttcatagttgaaaaatataaatcagttttgttaaaggtggtgcattagagagtaggaagatgaggcccggaagatctcgtgtattttaacatgttgttctcaggaagcttcatatggatatctgtaaattttaagaagccaccctaggataccccaaaataagtctgtggtcacgcactgctcacaaacagagcgtaaggcagagggcactgtttcgatgcatcctctatccagctggaaagccagaaatattattttcgtagtcaaatgattaaaatagtaatggtttatttactctccccaagtgtagttgggaaatacatgaggttaaaattcaggcatctgagtttctgtttctcctcctccaactatgaaggtaagttggtctctccctgtgcccattgtggcaagtgtctgcccaggcccttgaccagagagacaggaagcaatgatgacagagccaggcaagcccagacctcacatgagcctcctctgtaattttggatagttctggaaactggaccatcagccttaatggcctatgctgggaatcctgtgcacaccaggccacatttctcagcagcttgcctgtgccgtgcccctaaaaagaacagctcagacctgctctgcaggggcatttatcttgtcagctgaagagggtgagctcattttaggcacgttgctgtaaacaactgaaagatccactctcctaagcatagacctgactcaactatgtctctgcaaatggtctcccttttgcaacacaactgcaccgagaagctacacactttcaccttccagcagatcttggtcagatacattgcagtgaacttcccactctcttcccactcctttcaaactcagtcactgaaaccacaaccaccccaccactgtaacaacagaaccaatttcaatagtttgaggccattcccaagctctatctctcaggctagaacaaatgaacaagctccttgtgccatcagcattaatatttgtggtgtcaagtgggcattgtatagattttccccactatctacacatcagactgtgaggtgggtagaagggcatgatggccatttcacagataagaaagccaagttaaaattagttgcacaaagttatagcttacagcgacagaattggcccatgaattcattaccctttcattccactacagtatcagtcaaattttaaaaacaagcccaaaaatatatttccatatatgttttattttcatcctaggattttgagctgtcttgttaatattaatttatttaaatttcataggaagaatactattgaagtttctattactacttctgagtgactgtatgctaaaagggaatgatatgacttgcaaatatgttttgaggaatgttctatgaatatgcctaaaattcatggtttctacccaattaaaattttgtattcatgtgaaatagtttaagaaagagaaaatataccacatatttttatttgatgatttttaacaattatgaagaaaaaattgatgagaaaaagtacagactatactcttagatttttttctttttcttttgtttgtcctgttttgttttgagacagggtgttgctctgtctcccaggctgtagtgccatcatggttcattgcatgcagccttgacctcctggggtcaagtgatccttccgccacagccttccgagtagctgggactacaggtgcatgccaccatgcctggctaatttttatttttatttttatttttgtagaagcagggtctcactatgttgaccaggctggtctctaactcctgagattacaggcaggagccaccacgaccagcccagactataatcttaaatacatttttcaaatatgtgttaagaactagttgtgcgcaggctactttgctaaagagtatctgttcattggaatgttcagttttgagaaaataattattttataggcttatcaatggccattatcttgagtaaactaaaatatttacattaatgatcttgagaggagattgacaacaaagagccaggttatagagcaatcttctcttgagcctggatttgttcggatgaatgattacataatgatgtccagtgggaatcgcaggatgtgacagctgtttgacagcctgtcaattttacaaatgaagcaactgaagccaagtgaagttatgtcttgctcaagcttctaaggataagctgagtctgaaacctagattttcttttatttttctttattttaatttttatagatttaggagacacaagtgcaattatgtcacatcaatatagtgtatggtggtgaagtctgagcttttagtgtaaccatcacctgaattgtgtacattgtacccattaagtaattttcatccgtcacccccttcccacccttccacctttctgagtctgcagtgtctactcttctattctttatgtccacgtacgcacatcatttaggccccacttataagtgagaacatgcagtatttgactttctgagttatttcacttaagataatagactctagttccatccatgttgctgcaaaagacttgatttcattcttttttatggctgaataatattccatggtgtgtgtgtgtgtgtcacattttctttatccagtcatcccttgacggacatttaggttgatttcatatccttgatattgtgactagtgcttcaataaacatacaagtgcaagtatattttgatatgatgatttcaggttttctgatagtaagccatttgctggttttagcaaaccctaggatctcttctaaaggaaaatttctccacctggcagctttgcaaaatttattcagggaaattaatttcaggttggccactcccaaggctatgcttctgcagagaagaagttggatgtgcttctgaggtatattttttccccatcaagaaataacacaggaaattatagtaacacattttacgtttaaaattcatattttaaattgattgtacaaggtgaaaatgggaaatatttcttcacttgtcttaagaatgtccatatgaagatttctcatactttaaaatttttatgataaaggtgaagaaatgtagccagtaagctttgatttgacctctggtaacaatgcatgtttcaccattttccaaactgggaaactggtttatgtcctacctttcaattccttataactctacatttcttgagttaatcaaaagtaaaaattgtccaatgttatttcatgtagtattcaattactatttcccattgactgtacaatgatttttgttcacatatagaaaatagctaaaagtgggatacatattgttgaatgattattttttctaatagaacttttgtcttttggttacatgaacttctattttgagtttccagataatttaatttttatttatctttaattttttatttttatctattattttagtaacagacattaagcttcctattgaacatctcctattttcagtctatttactattagatacagagacactgaatctttattcataagaggaagagcttatttcctcatttttgtcatagttcccaaagtgctttttttagatgatttcgtttcttcttccaagaagaaaattggtcaaccttcctttaaaagttatattgtacatcaagtgttctgatgtttcattgagtcataaatgagaaacagaatttattataacatagctttcattctgtgtggagagctgtgtgggtgggtattagcattatttatttatttatttattttttaaaaagacaaactctcctttattctcctgttccagattctataaatctggagttccatctgagctcctgaaatcatgtaatttatatccatctctgctttcctgataagaaggctatatgcagagatttttagaacaagacttgttcagcttgagctagaactaaaatttttatttattttcacacttaaagtaaacctttccagctttcaaattttttttcctataatctgattatttggtgaagaataaaaataagaagccagaactttgtttttaaaaagcattaagtatgagtatgtatttaaaaaaaaaattcagtaatgattgatagtgatatctattttaccatagtgacattgaagaggttttaatatcttactgtattaggtattctcaaatattttcaactttaaaccttcaaaattcattcagaaattatttacgtgtcttctttatgattaggattctgtataagaattcatttgaaagagattcccacttctttaaaaatttgaaaccatcacttagaagactttctttttccattgtaaagtaccacatttttattaacaatatttagaacacataaaagacttaaaacatgccaatgatcccagctatacacaaccactgttgatgtgtagtatttctttttcttttcttaaacattttctcccctctatatgtttttacttattgattggttaaacttcaacttttattttagacacaggaggtccatgtgcagatttgttacatggctatatttcatccaggtaataagcatagtacctaataggtagtttttcaatccacactctctccctctccctctccatctctagtagtccacagtgtctcttttttccctgtttatgtccatgtgtgctcaatgtttagctcccacttgtaagtgagagcatgtggtatttggttttctgttcctgcattagtttgcttaggattatggcctccagctctgtccatgttcctgtgaaagacatgatgtcattcttttttatggctgcatagtattccatggtatgtaggtattgcattttctttgtctaatccaccactgatgggcatctaggttgattccatgtctttgctattgtgaatagtgtagtgatgaacatatgagtgcatgtgtcttttgagtataatgatcttattttcctttaggtatacacccagtaatgggattgctaggttgaacagtagctctgttttaagttcttagagaaatctctgaactgctttccacagtggcttaactaattttcagttccaccaacagtgtatgtgttcttttttctttgcagccttccagaattttctttttgactttttaataataaccattctgactggtttgtgatgatatttcactgtggttttgatttgcatttatctgatgatctgtgatgatgagtattttttcatagtttgttggctgcttgtatatcttcttttgagaagtatctgttcatctcctttgccagttttttaatggaatttttttttgttgttgatttaagttcctaatagattttggatattagacttttgctgaatgcacagtttgcaaatattttctcccattctgtagggtgtctgtttactttattggtagtttcttttgcttctccgtatatatatttttaaaacattttgataattatagtatatatgtatttttccatgccttaattttatatgtattttccatagaattattatatcagtattatcatatctctgggaaagagataggtgccaagatggtttttcatagatgcctagctaattatttgaaagtatgatttgtatatgatttgatttggcaatggcatgataattcatagagcttgtcatcattaatccggaatgctatctttattatatactagattctcaaaggaatttgggtctatttctatactttgttttcttctattggtttatctctctggtggtagcaggcagatttgtacgatgatccctgcctcctggtattcatacccgtgtgtaatcccctccccttgaatgtgggctggacccagtgatttgcttctaatgaactgaatactgaaaaattgatgagatgtcacttctgcaattagattacaaaaactgagacctccatcctactggtactctgttgctctctctctcgtcctctcacttgcttgctctgctaaagccacctgccatgttgtgagttgccctgtggagaaactcatgtgccaagagaatgagcaagatcgctagccaacagctgaggaggaaccgaggtcatcagtccaacagcctgaaaggaactgaatccttccgacaaccaagtgagtgagcttggaagcaggtcttaccctagttgagccttgagatgactgtggccccagtagacacgttgattgcagccttgtgaaacacccatagtcagagaactcagctaaatcatgccctgattcctgacccacaaaactatgagataataggtgtgtgttgttttaagccaatatgttttggggaaatttgttatgcagcaataattaactaacacagtaatcctgccacaaaatgctttagttcctgtagtcttatatgctttgatatttgataaaaatagttctgcctcatcttattttttccacattttttccatttaatcttccaggcgaacttattataattttttcaaatacctcccgaattcctgttgctttttttgaatttttgaaagttgatttgataattttagagttttgagtttttctatatggggacatttactcaattctgcttttatgtctcttcagtaaagttgtaatattttctttttatttgtcctgtatgttaactgctaagatgatttctaattatttttgtcttgttattatggggttttgtttaatcctttttttcttattatgattttgtagataggtaaactactcatttttgtaaataacatttttaaccagccacattattttatccttttacgcagtcctgtaatctccaaattatgacaattatgcatcttcttttctagtacatatactctccttatttatttttatttgcttgcattaaattttacttccagaacaatggacaataattgtgatagcaccattgtttcgtttgtgaaatttgaatggaaaatcgaaagtttactgttaaatttgttgctagcttttgatgtgattaagtgtaagaactgatcaattttgctttgtgtcagaaatgggtgttgtattttatgtcatttctgcatttattgagatatttacctgattttttatgtgaactactaaaattagaagttatataatagattctctaatgttcaccaatgtagcgactacataatatttcatcaggtgaaaagcattatagctcatatacctatgcaagccagtttttgcttttgtaaacacctatttgacaaacatatttacatagacaactttatcctttgttaaaaataataatgggtaacacatggaaatgtctgtatctcaggtactttacaatctttctatttactaactcattttttaacaattacaatcaccttatgaaataggtattattatgatatccattttacagatgagataactgaggcacagagaagttaaataacttgcccaagtatattagtccattttcacactgctgataaagacatacctgagactgggaagaaaaagagatttaattggacttacagttccacatggctggggaggcctcagaatcatggaggaggtgagaggcactcttacatggcagaggcaagagaaaaatgaggaagatgcagaagggaaaacctctgatataaccatcagatctcgtgagacttattcaataccatgagaacagtatgggggaactgcccccattattcaaattatctcccactgggtccctcccacaacatgtgagaattacgggagtccaattcaagatgagacttgggtggggatacagaatcaacccatatcattccacctctggcctcttcaaatctcatgtcctcacatttcaaaaccaatcatgccttcccaacagtccctcaaagtcttaagtcatttcagcattaacctgaaagtccacagtccaactcatctgatacaagggaagtctcttccacctatgagcctgtaaaatcaaaagcaagctagttacttcctagatacaatgggatacagatattgggtaaatatagtcattccaaatgggagaaattggccagaacaaaggggttacagggcccatgcaagtctgaaatccagcagggcagtaaaattttaaagctccaaaatgatctcctttgattccatatctcacatccaggtcatgctgatgcaagaggtaggttcccataggcttgggcagctctgcccttgtggctttgcagggtacaaccccccttctggctgctttcacgggctagcattgagcgtctatggcttttccaggtgcacagggcaggctgtcattgaatctcccattttggggtttggaggacagtaaccctcttctcacagctccactaggtggtgcaccagtaggcactctgtgtgggggctctgactccacatttcccttctgtactgccctggcagagattctccatgtgggccccacctgtgtagcaaacttttgcctgggcatccaggcgtttccatgcatcttctgaaatctaggaggaggttcccaaacctcaattcttgacttctgtgcaactgcaggctcaacaccatgtggaaactgccaaggtttggggcttgcaccctctgaaaacatgggccaagctgtatgttggacccttttagcaatggctggagtggctgtgacacagggcaccaagtccctatgctgcacacagcatgaggaccctgggcccagcccatgaaaccattttttcctcctatgcttctgggtctgcgatgggaggggctgccatgaaaacctatgacatgccctggagacatgttccccattgtcttggggattcacattcaactttttgttacttatgcaaatttatgcagccaggttgaatttctcctcaaaaaaatgggttttccttttctactgcatcatcaggctgcaaattttctgagcttttatgctctgtttccctttcaaaatggaatgcttttaacagcacccaagtcacctcttgaatgcttctctgcttagaaatttctttcaccagatactctaaatcatctctctcaagttcaaagttccacaaatctttagggcaggggcaaaatgccactagtttctttggtaaaacataacaagagtcaactttgctcccgttcctaacaagttcttcagctccatctgaggtcacctcagcctgcttcttattgttcatatcactatcagcatttttgtcaaagccattcaacaaatctctaggaggtttcaaactttcctacattttcctgtcttcttctgagccctctaaactgttccaacctctgcctgttacccagttccaaagttgcttccacattttcaggtatcttttcagcaacaccccactcctggtaccaacttactgtattagtccattttcacactgctgataaaggcatacctgagactaggaagaaaaaaaggtttaattggacttacagttccacatggctggggaagcctcaaaatcatggtgggaggcaaaagccacttcttacctggtggtggcaagagaaaaatgaggaagatgcaaaagtggagactcctgataaaaccatcagctctcatgagacttattcactaccacaagaacagtatgggggaaccacacccatgattcaaattatgtcccaccaggtccctcccacaacctgtgagaattatgggagtacaattcaagatgagatttgggtggggacacagagccaaaccatatcaccaagtaagtgtcagaaccaagatacaaatcaggtagactgggccttgttacaaactagacaatggccactaccacagtcaaaatatagaacatttccttcacaccaaaaactgtcttccagcatttatgcattcagtttcctatcctgcctagctgcaggcaatcactgatgtttgcttatctctatagattagttttcttggactttcctgtaaatagaatcacattgtaagtcttcttttacatctaacttgttttggtcagtataatgtttttcagattcactcatgttgttgcatatatcattagtttgttccttttccttgttaaatagtatgccattgtatggatttaccacaattagtttatctattcacctataaatggacactttgttggtttttcatttttaactattataaatatagctgctgtgaacatttgtatacccgttttgtggacatgttattatttcttttgggtaaataagtaagtgtataacatgtctttgcttacatcaatactggaatgtcttgacttctaaattctcataaccactcttctattaaattttgcttgtaaaaatatataaactactattaaaatttttaagttaattcttttcagactctgtcatctcagtgttgtcatctattgcttgcatttttcattcagctcacggctttcctggttttttgtgtgactagtactttttgattaaaacctggatactcagaacactttcatcaaaaaacaaaaatttcactgctgcctatttatagtcatttcccacttctgcacctagccccaggcaaccactggtctgctttctgtttctataactttgcctgttctagagatttcatataaaatgaaatcatataatatacagtcatttgtgactgggcgcagtggctcacgtctgtaatcccagcactttgggaggctgaggcgggtggatcacgaggtcaggagttcagcctggccaacatggtgaaaccccatctctactaaaaatacaaaaattaactgtgcgtagtggcacacgtgtgtaatctcagctattcgggaggctgaggcaggagaatcgcttgaacctgggaggcagaagttgcagtgagccgagatcatgccactgcactccagcctaggcgacagagcaagactgtgtctcaaaaacaacaacacaaaaaaaatatatagtcatttgtgtctagcttcttttacttagcgtaatattgagggtcagccatgatttttcatgaattagtagtccatcctttttattgctgagtagtattccattgtatgaatgtaccaaattgtttacttatttaccatttggaggagatttaggttgtttccaatttcggactattctgagtaattctgctatgaacattcatattcatttctcttgagtaaatacttagagtgaaattgttggtcctactgtaagtatatgtttaactttttaaaaaactgcaaaattgttttccaaagtgactgaaccattttacattctgactggcaagtgtgaatttccattttccttacattctccagaggtcgtttaagctaagtgtgctgtatccaatgagcaatgattcctcctccttctcctctccccaactcttgtcctcaacctactgtttgcatatactgcatggcatgtagttaaaattgcctactttatcctgcactggggcttggtgtttagggggagttcacattcacttgcctacgggttgtagattttcccacacacttggctgaaattggtttggcctattagctctttgattcagtgtttttttcaggttcctcctttttttgtactacaccgttttctgctaccacaatacttcaaaatctgactatgtcatctgtaatgtttacttttctgaaggaaaggttcgccactcacttcctagataatatgcaatgataaaaacttggcacaatttatgacactggaactggctaccgttttctactatgtgtcaattcctctaactccaagaactgttgtcctcctttaaatgtatatcttatgctgtcctaagttggctatgatgtttgtaatctgctagtacttgaagtagccattggggcttatgtaagaaagtggcctactactcacctgtggcagatggaaaagaggggtactgctgccaaaaagcccatctgctcccattgtctgtggactattttcaaagcaagagctcatatgattcacagtcatcatcgctctaggaaaataaaaagttcagcacattggagctaccagctgtaggggagggcatccaatcacttagcttccctatccattctagtgacaaaggacgctttgaaattatatttaacaagatatattatttcaggaagtaactattgctctctaagcagcatttgccttagcagccttgagccatatgctaacatatgagtgttgcataagttcattttgtgatcttcggtgagttagatactttcctaaatctccttgttaaaaatctgtgaaatggggctaattatgctaacacatcatggcatgtttgtaggattaggtactgacaagatttgtaaagagattagccaataaaaatccttaccatatatatatgccttctatttagaaaagataccaagttcaaaatatttttacttattacatgtacaaaagaaattagaatcttaagcaaagaggcaaggatgtgaccaacaggtcacttttgaatgataaaatttttggttttggctttcacataagtgcacagactctggcttcttcttgcatatggtaaattgttgtaaatggtttattgagaattctcaacatgatatggcataaacagaaaacttctgtttcaatgacttctttctccccaactgcactataattaccatctcctttcttgctgggtatattcactcttaccaacatcttggtcagattttctaacttttcgctctaggtattagcttggacctacttaggtacttgcaaattatctgagactcttttaccattgataggtagtttaggttttctctccttgagtctgggtgaatttggggctgctttaatcatcagagaaccacagaagtgatactgtgtgacttctaaggttagatcacaatatacttggtgacatttgttatatattatataatatatatataaacttccatatatatatatacatatatatatatatctcctattagttctgtccctctagagaaccctgactaatacagctaccacgaaaatcatctgtggtttttaaaaacccagtgatttaacttatgtgcataattaatgaatacctataatgtcctgggtgctatggtaggccttttacctttattatttaatcttcataacatttatataaagcaacttctattacctgtctctttcagagcaggacactgatagtctgggaggttgcgtaacttgcctgagtggtgaagtcaggactgcaggatttctgtctgacctcggaacccattgtcatttctctataccacctgcctctttgttcaagaatgttaacatgtaattctcaaatcaagtttttaaaaataccttgttacttaaattgtaaagtggacaaaagtcagagttgctggaattttccaaggaagtgaccttcatgtttcctattttgccacttttcttggggtaaatttattttaaactcctctttaatcctcacaacgtccttatgaagtatgaaggaggaaaatatcattcttttttccaaggacattagactaaagaactttagaatgtggcatagtagaaaaagtatagactttggagtcagacagaagctctaatcctgacagatgctaaaaatctaagtactttcaggaaactttctaaatagtgctctttggccaggtgcggtgtcttacgcctgtaatcccaacactttgggaggccaaggcaggcagatcacttgaggtcaggagttcaagatcagcctggccaacatggtgaaaccccttctctactaaaaatacaaaaattggccgggcatggtggcatgcgcctgtagtcccagttacctgggaggctgaggcaggagattctcttgaactcgggggcgaaggttgcagtgagctgagagtgtgccattgcactccagcctgggcaacagagtgagactccacctccccccgccaacaaaatagtgcctttacctgtaaaatgaaaataataccacctcctttataggatatgagacttaatacaatatgatcaaacatgataagcgtctgtcttggagcctagttcacaagagaaatccattaaatgttagtccttctttgcctattgcagccacaattattttactaaccctgagacattcaagtgaggctgagtatgaatcacacaggaaaaatgctaagagctagtcctgttttgaggtaatttgatcagttatacataaagtgatgctgtgcaatggtactcacaaacatgggacaccccaaatcaatatgtttagtgaatatttaaaatacaattccaaaagtttaggagagaaggggcaagaagatacatagatgatagagaatgggagaaacctaggacttgttatcgattgcaggaattgtgatttctttctgttggaatgagccaagggaaggggaagaaaattcatggaacaggagattggaatttgggtgcagcctcctggcacgtgctcatcctgttcttccaatttctggaggctgtgcctacgtgccttttgcctgttgcatacctcgcatcagtcagctctctttgttttattatagaaaattgtgcaatcctttctggtttgtttttgttaggatttccttccctttatctctagcaggaaaatattatcccttgaaatttcctctgggacatgattatttacagtaaactacaatttagtgaattcttgaggatttcttcttgatgtatcctcttttttatttttcattcttaaatgccttttgtttttggctgcttctctcttgagtgttttgtatatattttgaaaaatacctaccggcagcttgtatatcttttttccaaaacctctccaaagtatttaagaagatatcttccatatatatcttttgtatatacaaatatatatattatttacatataatatatatttcatcagacatatagtatttgtgcatcattatttttgtgcatcacagctttatatcttatatatttaagataataatctgcatcatctggctagcttcactgctcaggggatggtcagctcagtccagatcagtgtaatctcttgctccagttaccagatcagcctcctgtctagtcttcctggtcctggatttgctcaccttcccatcttccacacactgaaggcagacaagtcgtcttctgaagagaaaacctgatcatatctgcttagtatctttcaatagggtcatcagactcagggaagcatgatctggcccctacctgtctctccagcccatctcatgagctcccaccccattctatgcctggccataatgctgacttaagagttacctgaagaatgttttcctctttctcccctcctaccctctgcacttgttactctctctgccttgggaagctcatcttcaccctgtagctacttttggcctgtttaattcccactcattgtttaggacctttgttttgtgctgctctaacagaataccatagatgggataatgtttaaatgaacagaaatttatttcttacatatctggaggctgggaagtccaagatcaagtgcttgcatctgattgaaggtcttcttgctgtgtcttcacaatagtgaggcccagggagagagagagagagagagagagacctgaactcaccattctataatgatcacactccagcaatatgacactcattaatccattcattagggtagagctctcatgcctaatcaccttttaatggtccccctcttaatactgctaaaatggcaattacatttcaacatgagttttggagggggtaaatattccaaccatagcaagacccaacttaagcatgacttctttctggaagccttctctaatgtccctagactgattttgtgctgttttattactcctattttctatgcctatcatgataccatactcttttcaaattatttgactgccacattagggcagggccctggcctgatgaggtacgtactcaataaatatttgttaactgagtgagtgaatgaatgaagacaatgccttgaggcagtgttgctcaaaggttaaggaagctggagtgaggtggtcttggtttggatcctggttctacgcctaactaactgtgagacttctggcaagttattgcatctcagtttcttaaccagtaacatggggattataacaggaaacatctcattgaattattttgattaaatgttaatagatataaacagaatggtacttacacagaatacagtttcaggtgttagctattattattattattattgcctaaatattaatctggcaacttaatagccaaagtggaggcgtagcacctgacacagtttatgaggaatcgtccactcttagctccatgagggattcacaagaattgatttttttaaactgctggatttctacaacaatgttgtaaatgattttaaaaggtatcctatattataatttaatattacagttatggagaagacaactcatatcattgcttgaaggtttttaatatgtgctggataagtatgttttaaggaattagcatctattataggctgaattttcagttaacacagtcttgacgacagacagaaatccatgttaaataacgttctctaaaaactatatttaagataccagaaattaggtagaggaaactgtagaatttttcaaatagaaaatactgattaagacttagatgaaaactgttagaaaggtcataaattagagaaaaatcatgtttcacttgagtcaacaacaatggtgtgattaacacttttttttactgggtccagaaatgaaggaggagggaaggagagagagagggagggagggaaggaggtagagaaggagggagagagagagagaaaaaaaaaacttggaaggagtattttccatcacaaattatagggagtagctatcaatcacactttttaaggaaatcaaaggtgggataaaagtgcttgcagggtctttggatacaaagatggtgagaagccagataagctttgagaagctcaatcttcaaattacgagattcagcatgaattagattgacttgaaccaggggaaaaaccaggattaggttaagcagtgattcagaaatgttcagttagtaactgagacaactctatgtaggtactaacataaatgatattgaatgtttgagtgtcatcttctttaggatttatgtttttgttattttggcaaaatagcattaactaaatggaaaccatactgtattttattttcttcattttagttacttctgcccatagcaaacagctttttggattgagaggcagtgttaaatgtaacatcggctacaggaataaacaagagttcctgcccttgccttgaggcagtgtagcttgagtcagacagcctgcgtctgggttctactgcaagtcagtacaggcatacctcgaagatattgtgggtttggttccagaccaccataataaagcaaatatcacaatcaagcaagtcatataaatttttccattttccagagcatataaaagtatgtttacgatatattatagtctattaggtgtgcagtagcattgtctaaaaatgtacataccttatttaaaaaatattttattgcctaacaaggctatcacctgagctttcagtgagttgtaatctttttgctggtggaatgttgatcagggtggtggttgctgactcttaaaataagacatttgaagttggcctcatcagttgactcttcctttcacgaaagatttctctgtagaaaatgttgtttgatagcattttacgcacagtagaacttatttcaaaattagagtcaatcctctcaaactttgtcactgctttatcagctacatttatgtaatattctaagtcatttgttgccatttcaataatgttcacagcatcctcaccaggattagatttcactggaaaccactttgctcacccataagaagtaactccttatccattcaggttttatcacgagattgcagcaattccgtcacatctttagcttcgacctctaattctagttctcttatttccaccacatttgcagtgacttcttcctctgaagtcttgaacccctcaaagtcatgcatgagggttagaatcaacttccaaactcctgttaatgttgatattttgaccttctcccatgaatcatgaatgttcttaatgacacttaaaatgaagatttttttttttccagaagatagtcaatttatttttcccagatctatcagagaaatcactatctatggccgctatacccttatgaaatgtatttctgaaatgataagacttgaagattacaattattccttgatccaagggctgcagaatggatgtggtgtcagcagcatgaaaacattattctcctgtacatctccatcagagcttttgggtgactggatgcattgccaataagcagtaatgcttttaaaagaatcccttttttgagcagtaggtctcaacagtgagttgtgggcttcaaatatttgataaaccatggtgttaccaaatatgctgttatccaggctttgttgttccatttatagagcataggcacagtagatgtaacataattcttaagagctgtagggttttcagaatggtaatgagcattggctttaacttagagttgccagctgcattagcctatcttttgaatttttgaagccaggcactgacttctctttagaagtcctagatggcatcttcttccagtagaagagtgtttcatctacattgaaaatctgttgtttagcttagccactttcatcaatgatcttaggtagctcttctggttaacttgccacaacttctacattagcactcactgcttcaccttgtactttatattataaagaaggcttctttccttaaaaatcatgaagcaatctctactaacttcaaacttttcttgtacggcctccttattgctctcagctttcataaagttaaagagagctggggtctttctctggattaaactttggcctgagggcatgttgtggctggtttgatctatccagactattaaaacattctccatgtcaacaatgcatctgttttgttctctgatcattcttgtgttcactggaatagcatttttaatttccttcaagaattctccctttgcattcacaacttggctgtttggtgcagaaacctagcttctggcctatcttgacttccaacatgcctttctcactaagcttattaataatgtctagtttttgatttaaagtgtgagatatgtgactcttcctttcacctgaacacttgagtgttgaacactaagtgttcacttgaacactttgaggccattgtggggttatcaattggcttaatttcaatattgtgtctcaaggaacagggaggcctgaagagagggagagaggtgggaaacagccagttgatggagcagtcagaacacaaacatttattaagtttgccttcttatatgggcggggtttgtggcatccccaaacaattacaataggaacatcaaagataactgctcacagatcaccataacagatataataataacgaaaaagtttgaaatattgctagaattaccaaaatgtgacacagaggcacaaagtgagcacatgctgttggagtaatagcatcgatagacttgctcaacacggggttgccacaaacctttaatttgtaaaaagcgcagtatctgcgaagcacaataaagcgaagcgcaagaaaacaagatatgcctgtagtttgaaggacattttcaccttctcatatatgtactatatttattaagccaagattatctggtaagaaaacatatttcattttataaatgtcacaattcatgacagatactttcatagttaatgagagtttacagtacatgtgactatttagataaggcacttatttttgacactgtgttttatgttacaagtattgtagtttcacaacacgcaataaggtggtcccctgaccttgctatgccaaggaatctgaaataagcttgaccttgctttataatcctattcttctctccatctcctactttaaaagaaggattacactgcattacaataaaatgaactgatatataaagagtacatagccaggtggtggcacatagaaaatgatcagtggacattatctgctcttactgttgttagtggaagaggtatgtgtctttgaaatatgctggatgctttgctgagtcgtttatagtgatcacatctactcctcaaaagaaccatgggaaataggtgacatcatttccatttctagatgaagaaactgggctcagagaagttcagaatttgtcctagagagtggggggcagagccagcatttaagccagactggtccaattttgaagtacttccactcctcagtgatgatttctgtactgccaaagaagaccaagcagaggttagtatggtggggaggggtagggtgtgtgcatagaaagatgttctccagttctttctccagttaccaggttgtggattgaataatgtgattaatatactggaattcattttgtatatagttacatatataatatatattatatatttatatgtatacatcttttcccaatgaaagaaaaacatacattttacttaaatttccacatctatttttcctattatttcattataaatgtgttcattaaatattctttgatcacaagatttaacacatcacatgtaaacagcaacaaacctgtaaacaagaactatttaagaggtaaatttaggtcggtgtggtggctcacgcctgtaatcgcaacactttgggaggccaaggtaggtggatcacttgaggtcaggagttcgagaccagcctggccaacatggtgaaaccccatctgtactaaaaattcaaaaattagctgggtgtgatggcaggtgctgtaatcccagctactcaggagggtgaggcaggggaatcacttgaacccaggaggtggaggttgcggtgagctgagatcacgccagcctgggtgacagagggagactctgcctcaagagaaaaaaaaagaggtaaatgtaatactttttgattaacatgtgatacggtttgactttgtcctcatccaaatctctccttgaattgtaataatccccatgtgtcaaggccaggccaggtgaagataattgaatgatgggggcgggggtttcccccatgctgttcttgttgtagggaataaatctcacgagatctgatggttttacaaaggggagttcccctgcacatgccctcttgtctactgccacgtaagatgtgtctttgttcttcctccacccttctgccatgattgtgaggcttccccagcaatatggaattgtgagtcaattaaacctctttcctttataaattacccagtcttaggtatgtctttattagcagcatgagaacagactaatacaacatattaaaacctcactgatgtaaatcctagacattttgatttgaaatgaaacttccaacttcaaacctgactgcatgttaggtttgcctggcagctctgggactatggggacaacaaccatcaccaccaccccatgcctgggactcagccgcaaagatggtgttttaactgatgggggagttgatactgtttgaaacctccccaggggattctaatgagtcatcagggctgggaatcactggcctaaaaaagtagaagcacctacttgaatgggacaataaatacttgctgaaacagattaagtactcagtactttaaaaccaatgcccttggtcgggtgtggtggcttgtttctgtaatcccagcacttcaggaagctgaggcaggttgatcacttgagatcaggagttcgagaccagcctggccaacatggtggaaccctgtctctactaaaaatacaaaaattagctgggcctggtggcggacacctgtagtcccaacttctcaggaggctgaggcaggagagtcacttgaacctgggaggcagaggttgcagtgagccaagatcacaccactgtgctccagctggggtgacagagtgagactctgtctcaaaaaaaaaaaaatcaatgctctcatctgcacagcatccatgaaagaattttcctttggtctttaaccttcctcagatgctatctccttctccagacctatttgtctctaaagagtagaggctgctcaaagtttctatttcctccacttcttaatccatctcaaacaacagtcatgatctccatcctcctgcaactgatcttatcaagcctcaatcagtaattcatttactgtatcttaatatgtaatttataactaatatataacatcaatgtatattgaagacctacctgaagactgcagtgggtcataagagggctattgaatgcctgagtctctaggaattgataagattatagagttgaacaaagattttaaaattaccttgtcctgtgcttctcaagataatttcatttagagtgacacatccctttatttgggaagcttatttgaaatgtcagcaggtaataaaagagagggtggggctactttgtgtggtattgatggtggggacagagccctgattgctgggttctgtccacctttctgtccactgttccctcagagatagcccttagagatctccacagaccctctgcatctctgcaaaggacagtttggaaactacccatctagtcttgatccctttcagatacaacacaggatatgtctgccaccttaagaagcttctaggttttctttctgtttctttttttcttttttgagatggagtctcactctgttgcccaggcagtctcccaagtagctgagactacaggcgccgccaccatgcccagctaattttgctgagactacaggtgcctgccgccatgcccagctgatttttgtatatttagtagagatggggtttcatcgtattggcctggctggtctcgaaatcctgaccttgtgatccccccacctcggcctcccaaagtgctgggattacaggcgtgagccaccatgcctggccacttccaggttttataagtaaaacacctgtcagtgttaaaaacattataacttatgagctcccatttacaatgtgtttattatttggcagtcacctttctatgtcacatgtagtgacttgtttggtctcacaacagtactgtgactgcagttattatcactcccattttattgatgagtacacagaagcaggaggctttaatctgcttgccagtcacagctggggaatgtacttatgagcccatgctcttaactggtaacactttgccttgtattaatatatacaaggattctgtctggtagcctgcaccacacagacaccatgtctttgtgcatatacattatttaaccaacagatctttagtactggtggctcattattcattagtggcagatactgtagatacaggagttaatgccatgctaggaagacagacaacacacctgtaaacaaataaggaaataagatgatgcagtagggaagagcaaagaagaatatatgacggtgaagccacaggagttaccagggtgacggtgcatcttacttcctacaggcttgctagaaccttgccgctcaaagggtgtccagcagccggggaggattgtgtcatatgaaaggttgttagaaacaaagaatctggagaatcacctgagacttaccccagattcagaatctgcattttaagaagcttcccaagtgattcatgtgcacattaaaatgtgaggggcactgaacagcagagggcatgtttctgttgctaacagccaagattcattctttctctcccctgaccattcacacacacacacaaacacaaaatatatgtacataaataaaaaatatggactttgcattttgaaatgttacattgtaatataagaacagtcctggccgggcgtggtggctcacgcctgtaatcccagcactttgggaggccaaggtgggtggatcacaaggtcaggagtttgagaccaacctggccaatatggtgaaacctcgtctctactaaaaatacgaaaattagttaggcgtggtcgcaggcacctgtggtcccagcttgggaggcccaggcaggagaatcgcttgaacccagaaggtggaggttgcagtgagccgagattgcaccactgcactccagcctaggtgacagagtgagactctgtctcaaaaataaagaaaaaaaaaccaaaattcctaattttatttgcagtgtattctcagaaacttcatcatttaaaaacagtatgttattagactaatgatataattgggggttatttgctgattcaacatgaaataattcatagcactgactaaaaggaacataaaagaaaagctaagtaaaatttctatatattcttttaaaatatgaaatttaatgcttcaactccaataaaatgagtaaaaaatacactgtaaagttaagtatataaagaacttcaatttgctgtaaaaaagatatatagtatataaatatgattccagtgtaaatttgctttaaattaggatgccaattataagcattatttaaacatttaattaaaatgactgtatttgcattttgataagaaaattcataattttccaggccacttttatttattcgtttattatttttataaaattgtttaaatttttaatattttgatacatagtaggtgtttatggggtacatgaggtgttttcatacaggcatccaatgtgaaataatcacatcatggagaacgggggatctatcccctcaaacatttatcctttcagttacaaacaatccacttaaactcttttaagttattttaaactgtacaactaagttattattgactatagtcaccctgttgtgctatcaaataggtgttatccccactactttatttgtatccattaaacatctccacctccctcacccaccagtaccctttctagcctctggtaaccatttttctgctctctatgtccgtgagttcaattgtttttattttcagatcccacaaataagtgagaacatgtgacatttgtctgtctgttgtccaggccacatttaaagaccatctagttttatttcaacacatacaacctttttctctgaggacaagtaacactcagaatcatcctgattatcttagagttttcagaaactagtactcagagtactgaggtgttatttcagcaaaggttggtggcacttttcttactaaagacacttagaaaatagaaaccaccccaaatacccctacttggcactgcccagccttttcagtttcctcagagattttgtatagcaaaggtcaatcagaagccactgggggaagaaaaaaaaaaactaccaagggactcaagtcctttcaaagccagctgaacaatcatcatcccaaacaataatcccagtttgcctaggactttcctgggtttagcactgaaagtcccaattcccaggaaccctctcagttcctggaaaactggaatggttggtctctctaggtcactggtacggttaggctttctatccccacccacatctcatcttgaattgtaattcccatcatccccatgtggcaaaggagagactaggcggagggatcatgggggcggtctcccccattctgttctcgtgatagtgagttctcacaagatctgatggttttataaggggctctttctcctttgctcagcacgtctccttcctgccatcttgtgaagaagtgccttgcttccctttcaccttctgccatgattgtaagtttcctgaggcctctccagccatcctgaactgtgagtcaattaaacctctttcctttctaaattacccaatgttaggtagttctttatagcagtatgaaaacggactaatacagtcactaaagattaatttttaaaaatgggtttcacagaattgtgacacaatattgggttttattttgctacttgcaaagaaaatcctcccaaaatattaaaactcaacaccaaagagtatcaaatgttaatttaatagtatcaaatgaatagaacatgtatctggtaaaaagaaaaacagaaattgccatcgcctttttcttccctttcttaatattgtgttatagcctgtttgggagaaagcagaaaaatagacattgcctttatgattcactaaaccactgagctccaaaatggaggtaaatgaagccaatattaacagttctatttttattgatttaattttgctaaaactgaataatagaaattatgctttactcatgtgtaatatacagattgatactagtgtcttcagtggaccagtaagtcagaatgcatacttctggagggaggatggggtgacatcggttccttctgccattggtttatttctgagaatcttagggtgtattatcagtgacgtactatacgaggtcacctttgtgttaatttataaaaatgagacctttgaatatgtgatactttttgagatggaatgtattaatcagcttttactgtgtaacaaagcatttgaaaacttagtggcttgaaacaacaacttttattctttttttttttttttgagatggagtttcactcttgttgccagggctggagtgcaatggcaccatcttggctcaccgcaacctccgcctcctgggttcaagtgattctcctgcttcagcctcccaagcagctgggattacaggcatgcgccacaatgcccggctaattttttttgtttttagtagagacagggtttctccatgttggtcaggctggtcttgaactcccgacctcaggtgatccacccgccttggcctcccaaagtgctgggattacaggcgtgagccaccacgccctgccaacttttattctttctcatgattctgtgtgaagcctgaacgaaagctgagtggttcttctgatgtccttgtttgaggtgggttaaactaggacgactttattactttattagtaagtatggcgggctgggagtgctgggacaatcccctatgccacatgatctctcatcctctaccagactagtctagatttctcttttttctttttgagatggagtcttactctcacccaggctggagtgcagtggtgcaatctccactcactgcaacctctgcttcccaggctcaagcaattcttctgccttagcctcctgagtaggtgggattacaggggcacaccaccacgtccagctaatttttgtttttttttttaatagagacagggttttaccatgtcagccaggctggtctcgatttcctgaccccaggtgatctgtccgccttggcctcccagagtgttggggttacaggcatgagccaccacacctggcctagtctggatttcttcacttgccgattaatgaagagcaaacagcagaaagagagaaagccacacgcccttttcgagcctttgcttgcatcacgtttgctaatgtctcattggctaaggcaagtcacatggccaagcccaggttcaaaggttagagaaaaatactccgcctttttcttgtagggtctgcaaaatcacattgcaggaatgggtagaatttatggctatgttgcaagcaatcacagaagtggaactagtaaaccattaaaatgttttgcaacccagaagttcctggctcaatttctggcaaagcatttaaaagatgtattaaaagatggcatgcatgatacaaacaatccaaatttgctgactttttctgtaaagataaatggctgttagaatcatgttatggagcaaatattttgagcaaataaacacagtctgtcctttcaaagtaaatatgacatttcaacaatgtgtaagaaagcactaatttttcaaaagaaaattatggaaaaaaaaagcctttcaaaatagtttgaaaatatttccaatgtgaacttattctgttttaaaaatggatgttaattaatcctgtaatgccagcacttaggagggcttaggcaggaggattgcttaaggccaggagtgtcagatcagcctgggcagcatagagaggcccccaatctctactaaaaattttaaaaaattcaccaggcatgtggtgcgtgcttgtagtcccagctattcaggaggctgaggtggaaggatagcttgatcccaggagtctgaggctgcagtgaggcatgattgagccactgtactccagcctgggcaacaaagtgagaccctgtctctagaatctttttttttaaaaaaggatattggattatgcaagaaaatccaagacattcccaccacttatagttgtactttttaaatggatgtattttttttttttttttgagacagagcttcgctctgttgcccaggctgcagtgcagtggcacaatctcagctcactgcaacttccacctactgaattcaagcgattgttgtgcctcagcctcctgagtaactgggactacatgcatgtgccaccacacccaactaatttttgtacttcttagtagagatggggttttgccatgttggccaggctggtctctaactcttggcctcaagtgatctgcccaccttggcctctcaaagtgctgggattataggcatgagccacagtgcctggccaaggaacagtagattaacatgagattaaacatgccacatatttttaggttatcaattatactcaaagattcataataaaatatattgacacaaaatagttatatattggagtaacaggcaaaaataaaaaagcaacatttacaatgaaacatgaaacttcaaatgaattctgaagtttttgccatatcttcagacttggtgaggagatgtgggaataggtataaggtgagacaaactgcatttttatgtttctctatcactaggggttccttcccagaaaagcttgtttgagatgtactatcaccctatagggaactatccttacatatgtaatatcttggaattgtctgtttgcctatatgttttagatacaatttttcttttagtttagattatgttctccaggacagggttatatttcttaattactttttaggataatataaggtcattatagtttttaattaataaaaattaaaagtcttgaaaatcttttgaagttttagtggggaggtaaacaggtgcagtaactttggaaaacagatggatattcatataccaggtgagttagcagttttattcttaggaatatatgagaagctcttgcacatgtttaagactggtcacagcaacactgttcctaaaagcaaaaacctggaaagaactcaaatgcacatcaacaggagtgtggattcaagaattgttgtgtaatcacacaatgaaatattacatagcattcttacctaataagacactacaatacccacaattggataaatcttacaaatattaggttggagcaaaagtaactgtgttgttttctattaaaagcaatgacgaaaaccgtaattacttttgcatcaacttaatatactatccaatggaaaaaagttatcaggacactatctatagcatactacctttacataatataaatgctggtccctgtatatcaatgtgtcactgagttttgcagttttggtaggtcacacaatagaaatgaaagggttagtttaaatatctaacttgtaacacaaatagctttttttaggcatattaaaacttttactaaaaagaaaaaagatttaaacgtgttagaatggatatagcaaattatggattttatgtttttagtgaatttaataataaataaatacaagtatatagatttatgtttatatataggtaaaaattaaaagagcaaaacaatatttttgttgaattgaacgtaatataattttaaaaactgatactctcctgatgtagtacttaagcattagattccaattaaggttcatggtagccagcctccaagatggccctgagtgatcctgaactcctcatgttcatgcccttttgcagtaccctcctacttggattaggatggagttttgtagctataggatattgtggaaataaccatgtgtgacttctgaagctagactgtgaaaagacaatgcagcttctgtcttgctctgtcttgggtctctcacttttatggggagccagtcactatatcatgaggattctcaagcagcccatggggaagcccagaagaggaggatctgaagcctcctgctgggaaacagcagcaggtgagtgagctttcttgggaacaatcctaagcttcgtccaacccttcaggtgactgtggtcctggacagcatcttgactacaacctcatgagagactctgagccagaaccactcagctaactgttcccaaattcctgacctgcagaaactgggagttaatacatatttattgctattttgagctgttatgatttacagtaatttattacacagccatagactaatacaaaattagctagttatggttcttttatacttaatgcttccagtggctatttttttcataccaagcgccttaacattcaacatattaacaataaattatttcaaaataactcgtgctctgttatgtgtcacttcacataatataaatgctggtcataatatatatacataatataaatgctggacacatctcaatgtgtcactgagttttgcagttttagtaggtcacacaatagaaatgaaagggttagtttaaatatctaacctgtaacacaaatagctttttttaggcattttaaaacttactaaaaagaaaaaagatttaaacattgtgttaggatggatatagcaaattatggattttatgtttttagtgaattttcctatggatttttctagttttcctttcccccattgattaaattaaaacctctatattatccatgagttccttaacagaagtcctggtgcctggaaattatttatataatgaataatagctgccatttttgagcacttatcggggtagaggttgtgctaaggcttttatattcatttcctcatgcaattagaagaattagatgagaaaggaaggcaatcaccacagaaaggaaggcaatcaccaggaagaggtattatccagaaagtaggaatgagaaagggaaagataaaatgatgttatttgttttccttatgttttttgactttgtttttttagagcagttttaggttcactgcaaaattgagaggaaggtacagaggttccccatgtctccccaccccacacatgcatagcctccaccattattgacatcccctaccagagtggtacatttgttgcagtcaataaacctaactgacacatcattatcacccagagtccatagtttacattcaggttcactcttggtgttcggcattctatgagtttggacaaatgtataatgacatgttttccttattttcaatggttctttgaagagcattcatagtgcttcattaaaatatatttctttttatattgtatttttcttaattgaaacacataaacattttgtcatttagctgcaatttcattcaatttaaaatgcatttcatcttcataagaagtaatttatagtttaaatttaaaatattaccttttaaaatgatgatctttaatatacagtgaaagcttaagtttttagcatagtagatagtataactagagcttggtgattaatgctaagctagtgagtgaactactttattatggaaataaataagtataaaatattaatttatctcttaaaatttgaagtactaagttttattcctcataattacttgtatttttcccaattgaatacttctactttttgaagaaagatataactgtgttgaatgttataattcactggcagtcatgatatactttttaaagactgagcctgttaacatgattttaataaaaatcaggagagtgaaaatttaaactaaaaacagattccagctttctccaacatctttatcactttccttatgggcagtgttaaatgtatcttattctctttaatttttccttattgagtttaaagtaataacaaatagcaaatcttaaatgtgacttaagtatatactaagtgttccctattgactgactcctattcatttatttctcctgttggatattttcgtaagcatgtagcatagagctattaggaaggttggagaaggttccaatcaggagatgaattttgagctggtcttgaaagcaagtaatgagtgaaaaagaggtgaggtgggtgactttgggtacaattccattcaggatgagatgatagcaggtgaaaaagtacagagctaattttttctataaagcaacagaaagctgaaaaaattaaatttcaaaacaataccagttacaatactatcaaccatcataacatattaagaataaattcaaccaaatgtgtggtaggcaatttttgtatatcagctttgtattctctgacctcattaaattcacttattaattctagtaagttaaaatttttttcttatgatttttctacataaaagaacatatcaactactaatatgaagtcttctgttcactttttacgttatttatttatgtatttttgccttattgaactggctattacctctagtatagcacaaactacaaaacattgcagagaataagtaaaatatatctaaatatatctaatataaaatatatctaaataaataatgaaatataccatgtttatacgttggcagattcaagactgttaggacatctattctctcccaaatataaacttaacactattccaaataaaatctcagcatgctttaaaaaaaatctagaggccaattctaatatatttatggattgctgaagacctagaatatgcacattctgaaaaaaaattttattggagaattcacacacctgatttcaaggtatactttaaagcttctataattgagacaatatggcattagtataaggagagacaagtagatccaagaaaaaaaaaagtgtctagaagttgttccatagttacatggtaatcaatttttggcaaagtgccaaagtaaatcaatgggaaaagaacaatttcaacaaatgatgtggtacatctgtatgtctgcatgggaaaataaattaaccctgacctctgcctcacaccatccacaacattttttaagatgggaagtagacctcaatgtaaaagataaaatggtaaaacttccagaagcataggagaatgtctttgtgctcttgccactgccatcgatttttaggctaggacacaaacactatctataaaaagaaaaactgataagacttcagaacaatacatcattaggataattaaaaggcagaataaacaagaataaaatattatctctcttgctctgtgtgtgtgtgcacatgtgtatgtgcgagcatgtgcatcttaaatccggaatacataaagaactcttaaaaatcaagaataaaagtataaacaggcagtaatacataggcaaagacttgaatagatactgcacaaaagaaaatataggaatggccaataaatacatggaaaagtaacaaggtgttcagcgtcattggttgtcagtgaaatggaaatacatctccataagactacatttctttcttttttgagacagggtctcgttccatcacacaggctggagtgcagcggcatgatcacagctcaatgcaacctagacctccagagctcaatcaatccttttgcatcagcctcctaagaagctgaaactacagcccggctaatttttgtattttttgtagagacagggttttgccattttgcccaggatggtctcgaactcctgggcgtaagcaatcctcctgccttggcctcccaaagtgctggaactacaggcgtgagccaccacacctgactgagaacatgtcatacccactagaatgactagtgcttaaaaaatggacaatataagagttgcagggaatgtggagctcacacattgctgatgggagtgtaaaatgttacaaaactttagaaaacagtttgggatttctcataaagttataaatacacctattggcccggtgtggtggctgacgcctgtaatctcagtactttgggaggtggaggtgggtggatcacctgaggtcaggagttcaagaccagcctggaccagcctggtgaaaccccgtctctactaaaaatacaaaaattagcccagcgtggtggcgcatgcctgtaatccaagctacctgagaggctgaggcatgcgaattgcttgaacctgggaggtggaggttgcagtgagccgagatcatgccactgtactctagcctggatgacagagcaagactccatcagacaaaaagaaaggggcagggggaaccacctatcttaggtccagcaatcccactgctagggaaatgagggaaataaaaacaaatattcataaaaaatattgtatatgaatataacacttttatccataatagtctaaacctgaaacaacccacatgcccttcaataggtgaatggataagcaaatttatgatacagtcaaacaaatgactatttctcagcaataaaatgaatgaactattgatacacacaataatgtgggtgaatccatactttccaattcttttaattgaggcttgagaacagcaaaaattaagccatggtcaaagaaattggatcaggtgttgcttggaggagagggaggataagtcatggtaaaggggcatgagagaatcttctgacatgatgggaatgttctagatcatgattggggttgcacatatatatacatttgtcaaaactcacagaactgtacacttaaaatctgtgcagttagtgtaataaattttacactgactaatccaattaagagattgaaaaagccacagaataaggaaaaatctaaaagacatatacccctaagttatatattttcaaaatcttcctagaactcattaagaaaaatacagacagtccaatgaaaaaagccaaatgacttgagcaagacctcacatatcagggttttcaaaatggtcaataaatttatgaaatgtggcttaacatcatggaaatgcaaattaaaaccacaatgaatgtcattacccaacaaccagaatgggagaaacttcaaaaactgacagtgccaggtgtcttagtggatgtgaaatacttggaactctcatacaccactcattggaatgttaattgaagaactatttaggaaagttgttgggcagcatctgtgaatgctgatcctctgcatatcctttgatctagtaatcccattcctagttttatacccaaaacaaatgtgcatataaatgtaccaggaagcatttgcaagtatgttcatggcaactttattcataatggcctcaaacatgcctaccaaccatacaatggatacatgcactgtggtacattcatacatgcaatgaaatacggatattattgctactcctaataacagggataaattttgcaaaaaaaaaaaaaaaatagagctaaagaagccagacacaagattatatactgtataattctacttcaaaattaatttaaacttacatgaagttcaaaaaactggtaaaacgaatctgtggtatttggttgctgaataatggttatcttttggggacacaggtaattattggtaaggtacaccagggagtcatctgggataatagaaaaattctacatactgattaggtggtgtttacataggtgtattcaccttgtaaaaaaaaattaagttttatacttacgattaatgtatctttctatatgcatgcttcattttaataaaagatttatattaaattaaaatggaagaaataatgaaggcctgaagtaatgttaatagagagaaggggagaaaagtgcctgattttaaggatatttcagaggtaaattccataggatttggtgattgattggttttgaggaatccagatgaaatagagatgagaacaagctagcctggtggaagagggtgatatcatcaatggagactgaaaatataagcaacgaaggagtttgaggtgaggaacgagatggggtgatggaggaagtaggatcataaaatggatgtacagaattaagaaactttgggactatggttatgcctggggcaactgaaagtaaagatctgctgggcatggtggctcatgcctgtaattccagcactttgggaggttgagggagtgtggatcgcttcagcccaggagtttgagaccagcctgggaaatatggtaaaaccccgtctctacaaaatacaaaaaaattagctgggcatggtggtgcatgcctgtagtcacctatttgggaggctgaggcaggagaaccacttgagtccaggaggtcaaagttgcagtgagccgagattgcgccattgcactccagcctgggtgacagagagagactctgtctcaaaagaagaaaaaaagtaaagatctgaaagcttagaaataggttagggagggggatattgtcttcccatcattattatataaggtagtttgccataactatcatatgaggtatttaggtcatccttttttgctgatttcaccttggctttattctacactttgatctagtatgtaagctttttttttctttcttaaatctctttgattcttctgattgcttcctccttatgtataacctcatctgttttttaaatggattggatggagagttcaaacctcacctgacttcctgcactaaagctcttgtttgtttggaatacaatttgggggtgttatctccttatctaagcaacgtttatggttgtgtaatcattctattctaagtttgtttgcattgtactataagatgcctttttctatgcttggagtttgtattagtccattctcacactgctaataaagacacacccgagtggctgggcgcagtggctcacgcctgtaatcccagcactttgggaggccaagacgggtggatcacgaggtcaggagatcgagaccatcctggctaacgtggtgaaacccggtctctactaaaaaaaaaaaaaaaatttagccaggcatggtggcaggcacctgtagtcccagctactggggaggctgaggcaagagaatggcgtgaacccaggaggcggagcttgcagtgagccgagatcacaccactgcactccagcctgggcgacagtgcgagactctgtcttaaaaaaaatgaaaataaaaaaaaaagacatacccgagaatgggtaatttataaagaaaagaggtttaattaactcacagttccacatggctggtgaggcctcacaatcatggtggaaagcaaaggaggagcaaagacacatcttacatggcacaggcagaagggcatgtgcaggggaactcccctttataaaaccatcagatctcatgagacttattcactatcacaagaacagtaagggacaatcccacacccatgattcagttacctcctaccgggtccctcccactacacgtggggattattacaattcaaggtgagatttgggtggggacatagccaaatcacatcaaggtttgttgagtttcttggctatatatgtttatggttttcatcacatttggaaaaattcttcagccattatgtctttaaatgtttttttatgttctctcccatccttgggaactccaattacatgtatgttaggctgcccaagattgtctcacagttaagtgatgctctgttcatttttttttttcagtttattccgtttcattttggagagtttctattgctgtgtcttcacattagtcctttcttttgtggtacagtcacaacttctcagcaataaaatgaatgaactattgatacacacaataatgtgggcaaatccatacttttgtatccatacagtgtctaatgtgctgttaatctcatacaacagatggaatttttatttaagacattgtactttttatttctaggagttggatttgggtcattttaatatatccaaatctctattaaaaatgtttcatctttctcctgccttcttgtacatatggaatatagttacaatggaaatagagttacaatatagttttaatgtccttgtctactaattctatcagttgtagatccatcatttctggatcaaattctatcagttgtagatccatcatttctggatcaatttctattgattaactttttctttcattatgttttgtcatatttttctgcttctttgtgtacctggtaatatttgattggatgttgttcattgtaaattttatcttgttggggttattgatatttttgtattcctgtaaatatctgagttttattgggatgcagttacgaaaatagtctgagcctttcaaacttttaagctttgtgatttgggaggagagcagcctttagtttacggctaattttgccccattactcaaacaatactcttctgagtactctctatccaatgcttcatgaatgaagttttccactcctgctgggagacacctgaactattccctgtcttgtgtgagctccagtatttgctttctttgttcctttcatatggttctttgcctatccgtcaacctttgcctcacaggcatgcagtgaacattattaagctggagacatgagggggactctctgcagatcactggagttctctatgaagctccctttcttcagcattcttctctgcaaattccagctgccttggtttttccagatgaccagctccagcttcttaactctgattgaccaccaggctccccacttgggtttcctctcttcaggcagtaatctggggcacccataggactcattttatttgtttcccactctcagggaacactgtcctgtgttgctagaatccaatagaaaaaccattgtttcatttttttttttctgattttttagtttctggtgggagggtgtattagttcttgcattgctataaagaaatatataaaactgggtaatttataaagaaaagtttaattagctcacagttccacaggctgtacaggaagcatagctggggaggcctcaggaaacttacagtcatggtggaagttgaaggggaagcaggcatgtcttcatatgttcagagcaggaggaagggaaagaagggggaggtgctacacacttcttaacaaccagatctcatgagaactcacgattacaagaatagcaagggagaaagccacctccatgatccaatcacctcccatcaggcccctctcccaacactggggattataatttgacatgagatttgggcagagatgcagatccaaaccatatcggagggtaaaccttgtttctgttaccctatcttggtcataagcagaaatccagatgcattctgcaaacatattttttctttgttttctcccattggcacttagtctcataaatctgacagatttctatttatgaagaagtagtaaatgggccacacctgtgtgactttcttcctcagggaatcaaaggaagtcattccttacgtttcaattcaattcaattcctatcattgaattctatctgtgtgactgaaactaattcttgaaaaaatgtttcgttccagtcctcctctttcttttttaatgcctttcagctgttcccaatactatctgatggaaacactgaagttacactgatggctgttcagcatcagtggccaagagcacagatattggcatcaatcagagctggatctgcatcttggcacaactactgcataatcacagcattccttgagctcttgctacctggccaggcaaggtgtgatgggcttttatatgaacgatttcaatgagtattcacaacaatcctacctaatagcatagttggcgttattattatgagttatcacatggaggtctgcaacagcagtcagtgtgtctgagttgaatcctggcattaccccttactatctttgcattattgaggaagtcctttaacctcttcaagctttggattcttcatttgtaaagtggtaataacatcttcctcaatgtgctgtgaagactctaaaagaaaaaatatataaagtgcttagcacagtgattggtgcacatgagtgctcaataaaaggtgactagatgcattatttttctgtgaaacattgagaataaaagggatgttgccttgtagctttcaaacaaagactttttggaaacttgataaagaggccatgagaatgcacctcccagaccttctaccacagggcatagtagaaggccatttgtaattggcctatggcaccagctactaagttttgaaatgcatgggtacctttgcttgaggcttgaggctatacttcccatgggctgctccttgccagtgatgcagtgtagtggggatacaaaggcagactcattcatagagccatgggactcctaccagtgtccacttaggctcaaggactttctgctaactttgttgaaccttcgttagactgcactgtatttctacgatgcttccatgcaatcttctctcctctcttctttgcttgagattaggcttgcaatggagtcttattgctctacctgctgtttcctttcacacaggcattccttctaatcaattccttgcatgtttaatcctgttccaggtgttggcttgttagaggatctgaactaacacacttgcgttcttgttcagtgtaccctggcaatcatgctgattggaacttgcaaagggtttttcctggcccctatctcaggaaaatgatgttcaccactattttccttagaagtctctcttcattcctccaatggttccttgacctcattcatttgatttcccaccatattttaacagtgagagtcacctcccatcacccttctttgattttccttccagccacctatatttagtaattcattcttcatctgctcctttttttctctctcttccttgcaactttgaattgtaggatgtttagtgagacatcctatatccttcatatatctttgcacttcctcaacttttaattgcagtcaactttgcaaatttgcatagagattttctttatataattaagttacatataatggaatttttaccgtttttgtgattctttcttataactctatgttctacataaccctgcatttaaatactcattcagtttagtattggacaaattacttctctgattctcaaactcctcgctgtgaaacagggatgagcatacatgccccttctggttgttgtgaagattaaatgaacacacatcaatggaacctagctctgtgcccaatgtttggcaaaagttagttcattctcctacctaggtaactcaaaatctaagacagttcttggttgtattaagaagaaataaaatactgcttaaactgaaaacattcaaagatagaaagcaggctcatagaagttagcacagctaagggcaagatttgaattcagatttcctgatcccagagtgtgccttaattactaatcatttattataaaagaagacaaaaagtacttcacttctatcttgtcagtgtgttagtctgtttgggctgctataacaaaatactataaactgggaggcttacaaaacagaattttatttttcacagttctggaggctgggaagtctgagatccagaaacgggcagattctgtgtctagagaggacccacttcctggttcatggatggtgccttcttgccgtgttctcacatagtagaagaagctagtcagctctctggggtctcttttataagtatactaagtgcattaatcacttcctaaaagtgccattttctaaaaccatcaccttggggttaggattttcacatatggatcttgagggaacacaaacattcagatcatagcaggtgggttccccagaagcagaccctgagacaaggattcatgtgcaagtgatttgttatttattattttcctcccaagggaaatcagtaaggaaatgaaggaagaatagggaaggagaggaagccaaacaaggtgcaatattggacaaaagtcctgcggaagataggtgtggcctgatcccataggggaacttagagaataacgtgaggcagaggagcttggctttcatactcctctgcccagcagctaagcaccatccagagagaggtaaagttgcaggcatttctgaatcaacatgtgcaggggatgggggtgggaagcagcttcactgactgagggaagtcttctaaagaagggctggccatcgggagcaagagcagagaggtgcacaaaaatggtaaaaggggtctgaagggtctcggtggatcaccaacactgtgtacttcaactccagcctgctccctgggaggctgttttcacagttttgttttcacttagaagatgcttatttcaaagagcgtgcacgcagctgcatcttcaacctttttccattgactggatttttaaatacacacacacacactcacacacacacacacacacccctctattccaaaggccatcatcaaaccggtttataactgaaatttaaattagggtaatatctcttggatagtttcacattaaggaatgattagtattcctcttgcataacttcaaagctaaaaaatcctcagtgccaccattttcatatttcttgatgctatctagtcccttctcagaatcagcaaattaggcttgggcaggacctgatctctgcttcacccttgcttttatctaaaatattcttggcttctataataatgaagctaatacttatacaattatgcctatgtgctggtctaaatgctctttgtatgttaactcatttaatatttgcaacaactctgttgtaataagtaccagcataatccctgtttatgggtgaagaaacaggcacaaatgggtaagtagtagaagtgggtttcaaacactctggctctaactaaagtccatgtttgtaatcattatgctgaaatgcctctccacgagggatgaaagtccctccaaaagcagcctacattgatttctgttccatctactttctcatcaatgacttcctgttagcctgaattgaactaataagtactcaagactagtaaatacttagttcctgaacttggtgattcagatagcaggaagcccaatgtagcttccttccagtttctattctaggccatctgtggcttgcttcatattctctcccagcaggactccacagaggccaggattttgacacttttgactattataaataaaactgatcaaaatacctcctacaaatcatatgacataatagggaattaatagaccttttattaaatgattacaaatcatacttaaaaaggatataactgcacactgtatgatataaagctttaaaacatgcacataaattgatataagaaggcacttatgaagtccatacagtcaaatttatttacctgtatttatttacaggatcttcagggaatgtttcaggtggaggaaggggctcttggtcaatgagcctgaagactgcatggcaacctttgccagcttttggcctgaaaactcaacttcttcatttgagataattcctgttttatatactttcatttgagatattcctggtgtatcaactgaaacaaaatctatgaaatatcagattcacaaaaatacattttgaatattgaacgtggatagatgtatttaaatctttcctattttttgcactttcataatatatatcattctttatttttctactaataatgatgaatctacagtatctcagggccttattttcaatatcttaactggatttttaataaaagtcttactgaataggtaacacttgtttccaaaaactatgctcacctgtcaatgattcagaattcgtctctgtcatccctctgctacttagcattcagtgccctctactgccctccccgactccaccaaaattctctcaggccccaacagtggcatggattctgctctcgatgctttcttccactttcctgtcaaaatgcatttaaatcccattcgccatgagtatttttatgagctgcttctcactagagtgattacgactgtccttaaatgtggcttaatgtttgccctctgaaagaatttgaattttaacagagaacttctgaatacgcaaaaccttcaccccaaataatcaatctttaagggatttcgggcgccaactagaaaagtaataagggcacagactgatctgtttgtatctgctaatagaaacacggatttttgtctattaaaaagtgatagaaatgtctatgattaatgttttctttcctatgccacatcatgcggtgcttgcacatggttttatgcttgacttcccattgctaaggataaagaatcaaattatattagagcttgtttttggaaacccaaggggtacatgtagttaattagagatatgccctctgtttattttccctgtttttcctaagggatgtaaaaaacattttcaatagtattccttctggaaatcttatttagccagtgggtaattttccagtgttctaaccaatttaaatggatgcttttagaactgtaagcttaatattcattctagagcctctttttacttaggtaaaattctcaaattgctagtataaaaagatatttccttttattaaatgggattcaacatctcattcctgtagcttcagttcagagacatggatttaaaatacatttagtttattttgaccatgttaagtggatctgcttttttaaatttatgcaattatgacagatgttttattgattattctttcataaaatgcacaataagaggccgagtatcagaataattccatataatttcacatgttcccccaatgtttttgcatagcttaaatccataaaattgttttgaaggattttaatttcttttttgtttggcagctgtcccatgtttcgaaaaagccatttcctggaactttgtcagagtatttttactggcttatctatatctgtgttctgttatgtgtgacctcattatatccaaggggaggtagcaatactgaagtcaataatattcttcataatttcataataacatacatcttttgttcttttattactgtcggcactattatactgtcattcagtgctattcatttgccagcctccaggatcattggtgtaggttgagcgtcttggtcaatttgtgctgctttaacagaataccacagtggcttgtacaacaagcacttatttcttacagttccggaggctggaagtccaagatcacggttcagcttggtcaggttctgctgaaggccctcttttgggttgcagatgtcaccttcttgctgtgttttcacatggtgggatgagggagggagctttttggggttcttttataagggcactaattacatttatgaggtttccatcctcaagaactaatcaccttccaaaggcctgaccccctaataacattacaatgggggttaggatttcaacataagaactttggtgagacataaacattcagtttattgcactgaatattttcataacaatccacttactcccatacaacagaggatgcatgacttcagggttcttagcatgtatgtttatacagaatgacaagaggaacttgagattaagaaggggtatcagttaagactgcatttggctttatgtcacagaaactcaactctagaagcttaactgaatagggttttctttctctgcttttaaaagaagagtaaactcagtaaccagggctaatcagctgctcaagaaaagtcatcaagcacctgagcttcttcctagcttcctgctctgctatgcttagcctgtagttttcatcctcatgattgaaagaaaagagctcctcctccagtcattcaaggaaggtggacagagggcataagcgcagctgattcagccttttgttatcaggaaagtaaaaactttcctggaaattgtattgagtccatatttgcttatatgtgattgagaaggactaggtcacatagctaatgcaatctggaaaggcatgttttaagttggtacattgcacatttaatcaggattatgttagaaagaaagggatattgggtagacaaagcagtgtctgtcacaaagggattaagggcaaggtaagtgtatggaaaataaagcatccctgatctaaaggtcagtcctgaagctactatgattaataaagagggtgtttccatgaagtaggaaccacctgaaccaggtcactgcaggattgtcatctcaccatgattttgaacttgctgatgcagaaaactgaactatagacacattggtggtgataacagctttaggatgcacattcacctgaagctgcagaggcagggggaacactggaaagataatttattgatttacaatgaggatatagctaacaagtgtttcaaatattgatgcttattaaccaacccatctcttccagtaggtaaatgtacatgtaaaggcaaataattattggaaagaaatcaaagagaaatccaggttggaagacctctatagctaatgtagtagaaccaaaccatggtagcctgtgcttccatccttctcctgtcctgcaggttaacagggcccaggagtaaaatactgagtcccaggcagggcaagggatatgatgctcctatttgtacctctagctttcccttcactggctttaggagttgatttagcttctctttactacatccacattctttcctttgatgtgttaatatagtcactctccttacccccaagtcttgatctggtgaatcagtcagggaactgatagaaaacagatggaaccatttacaaggatgagggcagggaacccaccaaaggggtgatgcaccctagggctaaccaaagtagggagataccactacccttagagtgatgttgctttggctttagctgtaggtgaaggtggcctggcaggagctggggactttggtagaggaatacagccatagccaacccttggcctggcaggtagacagctgagttcctgtagacatctgccgttatccgtatcaaccagaagtgagggagcatggggaatccatgaataccatcctaaaaggcctgcctcctagggtacagagaagtgtggaggaggctggagagggaatctggagcgatcaaggctgaaaacccagcacccctaatcaattgactgttctatctcttcatgctaataaccatctctctcctctgatccagtagttcttattcaaagatgaatcattttcctccctttccaaagtgctccctatgtatggcacctcagtccaggtgaatcattttcctccctttccaaagtgatccctatgtatggcacctcagtccagggaataggctgttatgatgacaacctgtgtctacggtctctcctctaggagttcagtacttcttctcatggtggccactcagacctcagttagctcatgattgaattatctggcttatctttttacccagatgccaggaagctatagacaaatctgtagctcatctttatcaaagatacatgttttgcaatatgtatgttttagcttctttcctgattccattttttgatttccactttgttcctttattcctttacactttcttttaatgtatacgcacatttctcatattggggcatgaatatctttaggtcagggtttctcagccttggctctgtggaaacttgggcgagataattatttgttctgaatggcgaataacgtatccttattcacaaagtattttatccatgggtactgtcctgtgcattgtagaatgtttggcagcatctctggcctctacctcctagaggctagaaccacccaccccataacaatatctcctgctgcagggggtggggggtgcaaaattggcctctattgagaacctgaatgagaacctgattgaggacactgaatgaagtgttatatgaagaggtgaagtaaaaatatgagtcaaaatatggcacctctcttggttgtgccagttttgcattaaaaaatggagaatacatttattaaaacaagtatgttatagagtagcctttactacttccagaacgtttcagaataaaagatcaggagctgcaggctacaatccttggtgtaaacacgaacaaatacatagaacaaagctatcagactggatttttctgtcttttgcagacgtgtgactatggttgaaggtgctgtctctgattcagtaccaagcataagcatcactgactctgcaggaaggcactggcaccaaacatttagtaacttttccgcaggcttgagggattggttacatgaagctttgggcagtcttctgtcacctttctggctggaactctactttcttctcccctcactcctccccagttgggtgcagagcagtcaggctacatccaagattctgagggtctcactttctatccccagacatttatatgtatgtatatgtgtgtgtatacatatatttgtgtgtgtgtatatatggtgataaatgtataaatattattataaaacacttaaacatttattataaactgttatgttaatataaaaaatatatgtatgtacatatacatataatacatataaaaacaccttgcagcattagcttatgagagaagaatttctctacttcattaaataaatatatgtaacagaatgagagaaaatctgtagcacaatgaattctaatggaggacaatttcaagtgtcattttaggtctaggagcttgacacaggtttaaaatgaaacagcctttttcaatattttctgttttatttactgaactttcctctaagtcatgatcattggggttgtggttcttcttacaaagttaactccattttcatgctccattttaatcatctgatattttatttaatcttgattttggttatctattgctatattaaaaaaactgcaaaatttcatgactttaaacaataatcattttactatttcataattctatgtgttggctgggctcagctggtaagttcttttgtatagacttgaccaaagaacatcctagatggctcattcacatgactggcacttgatgctcagtactggctggttgctctgctggggctcctgagtgaagaggccacacatgccccatgcatggtggtttggttctgagagagggtgtcccaagagagctcatttgaagaaagaggaagtagaggctaacagtcttctaaaagactagaaccagaactggcagagcatcacttctgcagtgtcttcttggtgatgcagtcacagggccagattcaagatgatgaaaaataaactcccattcttgacggggaaaacgataaaaattttgtggccatctttagtccactgcaacctcctactggttttcagaagcgcaattttttttggatatttgggccactttggttgtcattaaatctggtatctgagcagcacctctttcactgatttggcccctgtcccactgagttcttctgcttcaaaactggctatttccttttcatttttctgcctttatcttaattttacactttgtaacatttcaaaccagaggctacacctcatctttgatttcagttatcaggtaaacatgagggtgtgtttactcatctgctccaggaagttctcattgtcttctaataaaatatgttcattttccataaaactttccaacctggaggcaggggtgctatgactttaatccatagtcacatctcagggtacaggtgtcaaagagcagttgttcaagtgggagacttgtgttgatctgggtaatcccccacctttaaagcctagttgttttgccccaccccccctccaatattttcttgacttagtgagtgaatacttaaagacaaaaggagctaaggcaatgaagatggagggaatgaagttctgggaaggctggaggggtatgcagatttgtaggggttacagatgtcatgctgcatctgtggaaatgaggattcaaaaccaaaggtgggtagggaataaatgtggaagtgtggatctttcctgaggttagggaggaggacaggggacaagggttacactgactacacatcaaagttttttcaggatatgtattatgtcttactgtccaaatattatgctatggtgttccttatagccatgaacatgtcacctatctgtatgatttagctccctcatttttgagagtcaggcaagacaacctgctattagaggagaaaatgatggtgtttgtatctaggttttattaaaaatcattccctaactatggcttatagttatttaaattgttttcagagttaatgataagattttattttggtaataaaatcagtatgatggccagaaagaagatatgaatgtttggaaaaattggaaatatcatttttgaaagaaatgtgacaatgcacatatataacatcttgcgaatggtattgtatatcaccaaacctgctcacagcaggaaaactagccatcacttctcacagtcaatgagaagtataaatcaaggacatagcagtaagctgtgatacccaagcttcacggataaattctcctaaagaataatgcactaaaaacaaaactacatgacaaaaaaaagcactaattgcaaatcactgtgaaacagtagcacaaaatctttatattgtgctactagtgacagcaacagaagacagtcaaacgcctaggcagatagaggcaggtccccggtgaaaccccacctccaagctgaagacagtttaaagcctgaaagccaaactacaagttaaattttcagactagattgagaacttgtcttcctgtttggcacgctttcctctgatctccacccttcacctattttacgtatacttaccctttctaattggttttctacactgtcgtgcctgcctttgagtggtgtctttgctttaacctttttttgcaaactcacaaaccaatcagcatgcactccccattctgagtgcataaaagccccaggctcagccacatgagaggggattttcccactttcgggtaggggaactgctcccagcattcgctctttgctgagagctttccttttgcttaatcaattccactccactcactttccggtgtctgtgtgcctagtttttcctggttgtgagacaagaacttggacctagctgagctaaggagcagaaagactgccaagactaggctacttgtcccagtttcaaactattatcaatactaattgaaagcaatcagctgggagcggtggctcatgcctgtagtcccagcactctgggaggccaaggcaggtggatcatttgaggtcaggagtttgagatcagcctggccaacatggtgaaaccttgtctctactaaaaatacaaaaattagctgggcttggtggtgggtgcctgaaattccagctactcaggaggctggggcaggagaatcacttgaacccgggaggcagaggttgcagtgagacaaaatcatgccactgcactccaagcctgcgtgacagagagagacaccatctcaaaaaaaaaaaaaaaaaaagcgatcagaattttttttcttggtccccaaatctcaacatttttttttcccaataggaattaggtagaagcactatgtctcattataacctcaagataatttttaaaaatctgttttagtaatagattttaataaacatatgagttagtataaaagatcttgaggctgatgttcttcaaagttgaccatgatgtagccacttttcttgattccgagtattgcaggattactcaaggttttgttggcctggcagctaataatgttaatgctaactctggaagtccagaagacataggtcagaacatacagttgtttgtgaatatttacactgacatacaggttttaaaagaaatacattctaagtggttttggttcaaagcaagagaatactgaaaacaaaaagtgccacatctttcactgagcattttactgcattcattccttcattcaacctactatctgtttccactcccattccttctcaatactagaattagcttttaaaaataaccacatgacttagaaacctctactcacttattgcagaccacgggatgaagtccaaactccaggtgctgtgcatgaggcccttctcatactgactcggtttcatttcattctccagtttcatttttcgtcctgtccctactacatgccataagcttgaagaccacatgcttcagtattaaaaatgcagacccttaggtcctactcagatctacaaaattagcatcttttgggggtgggacccaggaatctgcatttttttttttttttttttttttgagatagagttttgctctgtcgccaggctggagtgcagtggcgcgatctcagctcactgcaacctccaccgcccaggttcaagcgattcccctgtgtcagcctcctgagcggctgggactacaggcgcacaccatcatgcctggctaattttttgtattttagtagaaacggggtttcaccatgttggggtttagtagaaacggggtttcaccatgtcgatctcctgacctcgtgatccgcccgccttggcctttgaaagtgctgggattacaggcatgagccactgctcccggccggaatctgcattttaacaagcaaaccaaatattcttccccataatgaagcttgagagtcactcacttgacttgatactcttagcacatctgtatacctttgtgagaacttctcaaataattaaacctatcagggcatacatcataattttcaggctagaaaatgtcactgctattatctaaagaagcaagagttcctcccaaagaggagggtctgatcttcccctagaaaaaactgcacaggtgtagaaaaaactgcataggtgtagaaaaaagacactgcaattccactggctcaaggtggaaggagaataaagcctcggacactcccatgtgtctgcaagaacttcaatccttctttcatggtgtatttccaagtgtcctttcctcctgtttcactaaatatctgcactctcaccatgaactgaggcagcctgggatgcgaggtacctcctacctctggaccctatctagactgctgggttccactcttcccaatcaagacccaatgcaaatgtcacctgctccaggaagcctcccctaattctaggtcataatgtatcacttcacccctcgcactctcatccaatttcacttgtgtgattttctcatgtattttggatgtagctcaaacgtccccaagtcccacagcctgtgggtgcaaatgcagtcatgttagtcgtaatacctgaattattatcttggtatcctttttgccccgggaactccagggctgtgttcttgttgctggctccaaagctaacaataaaatcccttcacacaaatcgtcctttggcttcagacctcaaggtccgtgtcatctccgcaggaaccctcgtggggttggcgtgcccagtcccctccgctgcgcgtgcatcccgctccgctgacagccagtgctttggttctccagaggtgttaaatggcttgggaacataatttcaaaacggacagttggataaacaccagaataagcaccagaagatgacagcggaaccaaggctcgagatgggccggctgacaccactgggcgctgaacctggctggaagcttcctggcagcgacagcgaaaagggaacacctgtcgtgggcgcccttgtttcactgtcagtaagaagtagagcaactgctagacgcgctccacaaaaccctggacgcacttcatacacacccccaccccagcaagctcaagtaccctgtgaacctggacgcccaccacccccagggcaggcagcgaggagctcttcaaggggtaaagcgacccctgtggggccagcgcccgtcctctctcctgctgttcgcgggcacccgggcacgcggcgactcggctgaattagggcgtcctgcagctcccgaggcgaggaggcgcttggcctttccgttccgccctcagaagggagaggagaggtggtcctcgagtgggagtcagttcaggatgcgggctgtgccacgcgcggaggtccggggaccccaccgccgcctcctcgaggcccgccccgccccttacgacccgtccctgcaaccccccgcgtgggcttccggccgcggcgacccctgccccgcgctattgcgcgcgctcgttcgctgacagaggcttcgagggcggcagggcggggcttcggcgccgggggcggggccttcagcgggcgggcggggttttggcgccgcgaggtggcggcagcagagcggcgcagaagggagggggcggctggccgcgcggaaggagtgagtcacctgaccgctgccctcgccgcccgccgggcgctctcgcttcagtcagtcgggccgcgccgcgcctcagctctggtgagtggctcggccgtcccgccggcccttctccgggagggttggcgcggtcagggccgcgggcctgtgaggggaggccggcggacaggtccagtgaaggcgcgggcgggccgggggcggctctttctgggctgggcggggcgcggggggcacgtatcggggcccgcggggggcgccggcggccgggatcctggaagtggccgcgacgccggaaggggcgtcccgtcggcggccgaaccccctgcactgccggagctgttgtttacccgcgcgcgccgtactttacccggggcgggcgggggctgggggccgcggggtccctgccccacccccctccctgccctcgggcgccagcccggcccctcgcccgcggcccgcccgggctgtgacacatcagcaccgccctcgcggctggggccccgtattgtcctccgccgcctcccaccgcatgcccagcctcgcgtctactcagcccggtggctgtcgcgcgtggaatcgcgtaagaaaagccgagtttgtggctggggagagaaggccaccgtgctgagctggatttagcgaagactggttttggggaccggagagcccaggactccctttgttggagttttgcccacgcgttgtaattaagcctcgcacaatatggtgagagtgggcgttgattctggagacaccagctttgtgctcgtgtaatgtaacacgagtgccgttgctttctcattcttacacggcagtttcatgtcattgagtagaattgtgcggaatgcttttatggagtgaggcttctgcgttaaacttgtgctgattccaggtaaagtgtagtagtaattgtgaaagaacgtgtatgaggaaaacgagctacaatgtcatgcttggaggaacaaagaatgttttgtaggatgctttgctttttggagaattgtgtaggggtagggactgttacccatggatgatgctatgggaatttgatcatgtatttgaacaccctttacatcagagggtctgcattgaatgcagttcagaaggataaagggtggaaatcccagatgtgttagtggcagagcacttgagcgcttcacatagtcaagcagagaaatgggaagaggtcggcttgcttcttcctggtctttgggtagtggtgcaagggctgggctgggcttgaaggcacttgccacttctgcctttggacatcttgaagaagcttagggaagaaaggctcccggtgagtcagcttggagtagggtgactttggcgtagtgattcttgtattgttgtttaacctatgtttctgtcaagtggtttactgttgttcggtatgttggttggttaacaaggtaggatgactctctaaaaagttgggttgctgagtcattcgccccagcttgagaggtaattagaaacagctggtgcaaatactctcatcacatgcctccactataaaaggccaaagagcgctctagagaggttgcttcagaaggctgaaggggacccagctggggttgttttgatacaggttatcagtgggtgaagtggaagagcactcttaggcagtggccaatagcactgaggcgggtttaaagacggagcctcgtgacctgctgtctgagaataaatttgcgctggagagagctaaaactggggaagaaatttgcagctaggggtaacccaataaaaaatattgtaacaaaaatatttactactcttactggacttagtttcctttttgtggtttctgttacgtggtctataagtttcaagcagtgagcttaatttgtgcgtcataaaaatttggttatgagtacacagaagggacttgctctgtttctcatggcccttggcttttcatgcatacacaagaagtttcaggagtcagaggagggtaagcaccatatgggtggaattaataggtctcattgggttaagtctcgaaagagctgtttaataaatagccaaccgtaaatacctgtctcattgtcttgattatatgacaccactgcctttacacctggtgtcattgcttcttgctttaaaaaggagcacacaacccaaatatttatatgagtcctcattgcaaacaaagtttaggaatgggaaatgtagagctgggaatttggccctttggtgaaaaaaatgatgattcctattaatggtagttcatttaaaatattctgtattaggaaaaacgatttattttgttcctttaagtctgggactagaggagattagaaatcatgaattttgtaagtattagggcctccaaggtggggtgcaaggaggttcatttggaaggaatatattaaaacttttaaaaactttaatataagaaagacattaagcttaaagatgcagactaacaatcgtgtattcatattatataatgcgcgtgcatgtcctccacccctttgttgctgggggaacatagcctgttaaccactgtcagtaacattctttcaacaaccggaatgctttttcttttaacttacggtttcctcctaagagttctttcagactgttaatattccatttaagttttattttataggtagttctattgtctgtatgttttactttagaagcttgagtgtaaatttcttgttacattgttgatactggggatggaaatacaaaaaatacagaatttcatttgataacctgtattttgaatttggagacaagcccagcggttggtttaatgtatgtgatctgaagtgcagtgatgtgtaaaagggtgcagtggaaatacttgaagataatctacacattggagtgtaatatgtatagcatatgtaaaaattagtttgtactgttactccttgaagtctgtttttttttgtttgttttttgccaagcttatgttctcttaagattaataagacgacatattcagtaaatcccttgggaagtggcatttattcagaatatcaacctcctactagtgctgggggcgggtggcggcggtgagggtggttagtatttaccattcagttaaatctcatgtgccatgtgccttctacacccctgtactgtgagaggtgatgctcagaataacagttgcaaagcccgttaaaattaccacttgtcagattttctcttcatagtgctgatctctccatgacttacgttttaggaatcaccacctctcttctaattttctgactaatgttctgttaatgagagaattgtcttaaccctaaaacctgcattccctgagcattctagacagagggtttattttatgtggtggaacgatgatttttgagattgttttgatttaaaatatatgtcaaatgaggtaatgtaccgatggccaaggtatgggtaatttgagtgcaattcgccagaatccgtgccccttggagggagtaaacatttcaggactgcagctaaaacattgacttacactctcctgaagcccaggcacctggcttacacagtgcactaacataactgaagtctgggtttgatcactgtacagttgacaaagaagcagtaagcagaatggttaaaaagtagttctggagccagactgcttaaggtcaggttctggttgtgtcacccactttaaagccttgggcaagctcttctacctggtaactagtgcctcattgtttcctctgtaaaacaggggtggtgatagtagaatctgtatcagagaggttgttgtgaggattatatgcgttaatacggggtaagtggttagaacagtgccagctttataagaaacatcaagtgttaggtgttattatctgttgttcagaatcagggaagtacttagttacacagtagtgttttatagctgttgagagctgaattgccggcattgatcacaagtgagactggaaaaacaacccggggaacactcttatgttaagtcagtagcaccatctcaaacatacatccaacttctgagggcaacgaacacaggacatagctttttacttaaaggaatcttaacagtctcagcggagtgcttgaggtagtcactaaccagttaattgaaactggcttttacgaaataaaaacacttgccattctttggctagtcttttccacgttgtagttgacattgtggcctggcagctttagtaacctgtccacccctcccttcttgttaataccagaacagaactagtttctcagtacatattcctgggccctatccagtttgttggaaacatttagaatgtaaatttgtaagctaattagtttcttctaagtattatgttttctttagatgatatgcctgtactaatacagaaaaattatccatgaaatggatatgaatacaatggacatatttatcgtatagctttttgtacctgttagtaattcagaaaggttgtgttattttgaccattctttcagccagattgtaagtttcctgatggtgagaatctgtgtctttctgttttatctcctatggcactctgaatgtgccttggctgtgtttctttaataaactgttggttgctgaactgggtggtatgatatgcgttcattctagttctgtgattttgaaacttgggaatgtttaacagattgaaggagagaacatcgtgtgtggtaccttgtaagtgtgcactgagttgaaattcttttgattatttagctttctactttctgtttttatcattggtgtgattattgagaaggcagctggaattaagtaattctagttcatctcctaagatagacataaaacttgtcttgtgacttatttttacccataattggattagaattgaattgagcaaaatataatttggttttctagatgttaaatgtcttatatgtctaatactttgaatatcactcctctagaacaggttctttgttttatttaggatcagggacaggttagaaaatattcaaatattcataggataataaaaaactgccctgaagcaaacgtgaggaagaagaaatagtggtagccagaatcttggttgttaatgaccagtgtagaaacacagtgggcatgcagtgaaattggctggcagctggttccttctcagtacgggcacaatttagaaaatgttacattaatgcagctgaaattttgtgcagatcatgttatttgaaaaataaatgtaaacactttttgcagtgccttaggaaagtcatcgttcaaactaatatttttgtaataaactagttattcccagttttttttttcttttttttttttttgagatggagtatcactctgtcgctcaggctggagtgcagtggcgcgatctcgggtcactgcaacctccgcctcttgggttcaagcaattcttctgcctcagcctccgtagtagctggaattatggggcaccccccaccatgcccagctaatttttgtgttttagtagagatgggtttcaccatgttggccaggctggtctcgaactcctgacctcaagcaatccacccgccttggcttcccaaagtgctgagattacaggcgtgagccactgtgcctggcccctaattattcccagtttctttcaggtaaagtttttttcactttttaaatttatcatttttttagatcagatcagtcagtggacagttgcactctacttccccatccctcattaaagtggaattacactaaaaaaggttttcaattcctttgtagcctggacattagtaatagcctacctctaaggctgtagagtaaatagtatagtaagggaaatgtccctccctccccctacacaccttttttccagttatctcttctttttattgatttgtctgcctccaggaccctagggaggtgtttttgtcctaaggaggtgaactcctgagggtcctattgaagaaatagggcgacctatccacccaacttcctctttactgatatcttcacatgcttattgccttattcattttctaaagtgtgccagcgtctttcagaagtcagctaaattagtgcagttgctcatccatcagacagttttgttataaaatatgtggctataaaagattgaataaatttattaggttgtaatttcattaatgtgtattttatatttaaatattattttaaaaaatgtacagtggttatctgatcttggcccaggcctcttcaatttccagtgtacctgatgtctctttatcaactgtttttctgaggtgtatctcagcctggccttgggtactcccctaggtaagagtcataattcaggttaaaagaggtaagaaaaaaaaaagcttttggcttttgtaatcttgtttttttttttttctttcacattagcaaaagactgttgaagtagagagcattttgcccagctcactcggattctttgctggcatgccttcagtttcagttgtcatccagagaagtcaaaggaaatgctgcttggggatgagcatgtaattacgattaactttccctacttcgttgtctctttgtggtaaaagactgtcacaagtgctattcaaactataggtatttttttttagatttctaaaaagtatattttgtctctgagggcctcctgtctttggactagtttgtctttttccagaccccagaaaggctgggccaccttttcttctttgagcaggttggcaacagtggtcacaaatagcagaggagctgagattctagagagctatcctaccactgcttctcagatgccagtgtggaaacagcctcttcttttttgttgaattagcttggaacagctctctaatctctgaagagtgaggaaaaactgtgtttttaagtttcaaggctaaggcactgtgttctcttttctccctgttcctgctgctgttctcccccaactcacatgaacgcatacttaactttcagtgtatgtggacagtagggttgctaaattcatgtcaatatttgtggcattcctacatgttaggcatttggtttacatttaacttatgaaacaaatgtttaggcttttataagccaggaacttttccagatattggcaataatgaacttttcagaagttacagtctaatagacaggcaaactattcccatagcatgctatagtagcaacatgtaaaatgtgctgtggaaccacagactattaaaagcctaagttttgggaaatcaagaaagccttagggatgtttagtgatgaatgcataggttagtggaggaaacaacttgtatcaactcaatttgagaagcttagctgtgaataagaggagagagaaatagattttagtagggagaagttgggtcaggaagagtgtgtgtgtgtgtgtgtgtgtgtgtgtgtgtgtgtgtgtgtatttaaaaatccagtcaatggaaaaaggttgaagatgcaggcaacgtccttgttttgtccttggcaagttcctcttatggttgcaagatggctgccacaagttcaagtgtcacaagaaaatatgacttaagtttcctggaagaagacacactttttttttttttttcctaggttgttgctatcagtgagaaaaatttttccctaaagcctcatagcagatgctaccttgtccctctctcctctcttcataggtcagcattgcacacaagccagtgcctaaatgagtcaaggtcaaggggaatagtaccgctgtgattggcataaatggatcgtgattcatcttaggttgtggctggggtctacttccttggaagttgatggcctcgggttgagagtagatacgtgagcacagtcagggtttggttagaaagtgagggggtgaatggtgttgtgcagttaacagtgacatccttgtctactagttctgccaccactacacttagatacaaacttcggaggagaaaaagaaaatgtgcttgcctttggatttggaattttaggtgactttttttcctcttatatgccatttccttctatgatcaagtagcacttttacaatcaaatcaaatcaatggtttatttaaaaattatttaaaaattgaaaatgccaattttgtcaataaatatatatagaagaaataattttttttttcaatgctttaaacatttcaaaagttccctgccattgtcttattcctttcagggagaggagaacatataattatatcttgtagtttctgattatgtgtatactaagaggactactctgtccctcagtccatagtgcacacccacctgtggtctctatggcttgcactgagtgctgaggccagcctggctcagatagaattgttagttcattggctagatgggtcaggattctttagaatgcaaattcttgaatcaggagtacaaacaggaacatcttcccttttctacacactcattcccctcctcgaagggaaagctgtcccgtagttagcttattcgtcattcttttcagactttaaaattaatgccaccttaagtttatacagtattcttgtagtactcctaacttttctgttttgctgtatgtgtacattgtagaaagattaaatcaagctaattaacatgtccattacctcacttacctttgtgtgtgtgtgtgtgtgtggtgagaacctttaaatctactctcttagcaattttgaaatacagtaggatccccacccactgttttactttcagcagtttgttacctgtggtcagatgaagtccaaaaatattaaatacaatagatattttgagaaagagacaaacatcacattcacataacttttattacagtatatggttataattgttgtattttattattgttaatctcttactgtgcttgatgaaaaagcatagtatatatatagggtttgttactatctgcagtttcaggtatccactggggttcttggaatgtatcccctgtagataagggggacacctgtgtatgttgttacaagtatgatcactgtgtaaaagcacttttgtatttcattcttgttccttctcaatcgcaggtctgggtgctttctgtgctgtgaaaggcagacaaataatgtaaatcctaaacacttgagtgttgtaaatttacaaaatgagaattgctcaatggttgtttctttttgagagtaacaaatagactgtgataaatggccagagtaggcttctgaactggtattagttttttggatagaatttagaaagacttgtactaccaatataatttttgtctcagataaatgcaatagtatttccctactcagtagttcctcagatgctatttaaactgagctatatttcagctttatttataggctgcaaattgttccttatttggctgaatcttgtggttatgatataatgaaaagtagttactgagatcactggtgcaaatctgtagcttggaaatcctcattttagaaatgattattttgactcccaagttaaatagtaaaaaatagacttatgtttttagttttagctatgtatattgagaaactgtggccctacggtggctgttagggattagtggattaggttgtttttaaataagacatttcagtttagtatctctacttgaataaaacagtttcaaatttgtgattcatatgatatactgattgccctacggtaacttctgttttatttaattaaaattgttaacattcttttttatactcttaagcacctccctccaccctcacccccctttttgactcaaattttattgtgagttggtgtatagttaggaatttgaagagcactttttttgtttattttatcttttcggttactatgcatactatgtgtgtcaactcttaaacctgcagggggtcattttggccatcaactagttttagggctttcgcctcctaaagaatatgaattatggttgtaatttttacagtttaaaaaacaagatggcatatgaagaatctttatttcattatgaaaatagaacatggatgcttaatcctctgtattgaaagtaacttgtagtgaaatacttcctagtgttctcttcttctagttgtccatatgtagtatgtataactatagaccttgatgatttaagttgagcacagtttagtgtcaggttcctttcagtgatgcatgagattggttatatgatctagtgagtgttatttagaaattaattcaccagacccgggtgtggtggctcatgcctgtaatcccagcactatgggagggcgaggcaggcagatcacctgaggtcaggagttcgagaccagcctggccaacatggtgaaaccctgtctctactaaaaatatgaaaattatctgggcgtggtgatgctcgcctgcaatcccagctacttgggaggctgaggcatgagaattgcttgaacctgggggacaggtgttacagtgagccaagattgtgccactgcactccagcctgggtgacagagtgagactctgtctcaaaaaaaaaaaaaaaagaaagattcaccaaatattgattaataaggggaaatttgttgttccacaaatgcccatttaatctgtttgtgtaatagtgttccttctcatcacacacaggatacttggggtatttcttgaactccttgttcttccatccctcctcagttttacctattcttcccccacataccacttgagtcatgtaacatgaattgaaatgtaatatttggacctgggagcagagactttttcagtctttaaattattgcccttctcaagcctttagtttccttatctgtaacagaagcgggtcatcctggatgaatgtgcttttttaattggaaattctttaggtctgtgaaattagccattattttgggcagacttgtgcaattttaatattttcattttatcttgagatccttattaagcttaactgaatttttattataggaagtgttaagccaggtaatttacagaagatcacatggttgatgatatcagtagagcgttaatctgattatccacagctgctggtagccttaaaataacctaaaacttgatttcctgttgtccctaataattctgtgtgtttaacacttcatatttttcagagggcttcgtgagacagatagggtgggagctacctacttaggctatctattcagtttcacacatgcacatttgcccttgttcacatggctagacttgacttgatgggtctttcctcctcattttcctatagcagggttctctcattttttttaaacaccaagtcttctttttattttagatttctataaaatttaatttattctttagtaatttattgtgaagaatctgctaagttttagagcccatcaacttatcatgtagtgacaaaccaattatctgctgatgactgtaggaaatatctactctaaagggggaaaatgtaattggcaatctttgggagatttcacgacaatcaaaataattgtgaactatctttttaaccaaggcacattttttgtttgtttatagttatttattccaacatttttctgattataaagtagtatgtatttatggttaagaatttgaatgcagaaacaaaaattacctagatcttaccatgctaatattttaattatatatcctaacaaggcatggtgatggtgatgagggtggcaaccaagatttctggacatactgaattggtgatgcctattagacatacaggtagtaatttgagtatgcagttggctatatgagtatgaaattcaagagagaagtcaagattggaccaaatacgaatatgagagtgttcagcaagtcagtgaagtgatcgtgtctccattgtgggtccagatgtgttcacctagggagtgtgtgcaaagaagaaaccagaggattgtggtatcctggaagccaagtgaagacaaggtttcaggaaaggaatgatcaacttgttaactattgctgagatgctgtgtaagaagactgaacatttgccatttggtgatgtggaagctgttgagcttcactaaatggtttccacggagtggaggggaaaaggcttgtttgagtggcctcaaatgaaattgggaagagagggaagagacagtgtgagtataaatggttccttttggaaattcagtacaggagagcaaagaattatagatcgaggggtataaggagggtcaataaattttaagagaggatccattattcatcagttccattaaaggcaaatgcaaaattttattatgtgcgtggttttctggtggaagttcaatagatttcatcagattctgtaaggcagagaaccagtgctctagtgatttggcagttcaacagctcatttttctggaggatacccttaaaattttaactgatttaaattaatattcaccagtattaaatagtatgtgtaacatcgtacccaaacaagatgtctttctgtatttttttctttccttctcttagttttgttaaaatctttttagttcagaatattctctatcaaatgccttttctatttgaagactctcctaaaaagttatattaatacttgcaaccaagtgatcaaccatttacatttaactaaattttgctacttttgtttactatctatttaaacattttaagtttgtgtttttagtcaaagtaatacttgttggtttttgtttgtttgtttttttaagtacagagaacaaccttatctgctgcacctcaccccctaattctgcttcagagttatgtgcaatgtttactggtttctgctatttaatttttttggtggatacctctgtctaaaatgtttacacctcagtttatttatcaacctaagatattatctgttgacttggtattactgtgggtgatgatttcgtttactctactatccccccacatgtatttgtaatcttattattccacttctactgttgatcacctctgcaactccagctctaaacactttttttctatttctttttcttgtctcattaatctgaggcagtgccttttgactctgcacattgtaagttgtatggaaataccattcccattcttcctgattctgtctcccagcctgctttattttgtcaaggttaataatatttacattctatgctatagttataattaagtctctcattatttgtctattctaaaagttgaaaaaagtcacagagatgtaaagtgacatgcttaactgacagtggagtcctcaagttataaagtgctattaatcttttgtgctgtccacccataggtatccctagagcagcgctagctgctgtttggcagtttctggagaagtctttatgtccttacttgtgctccctgataacaactctgtcctcatcttcagcccctgattgtgggattttaggggtatctgagatgtaagcatttagaaagtggtgtagacaaaccgtggaagaggctgagttgggaaattttacgtgttgggggaattttcattctttgcttttttcccctcccctctttcttgtgggagccttaactgggatagtaacaattgcacccgcctctctgcccattagttgctcatcttagaaaatctacagttaacatatttagtggcgaaatacttaacactttccttatatgggaatgagatgaggatacccactgtcaccactctcactattcggtcattgcaataagggaagaaaaagaaataagcataaagacgggaaagaagtaaaatggtctctgtttgcagatgacatgattgtgtgcatagaaaatcctatggaatccacaaacagctatccgaactagtaagcaaattaaggttgcagaattcacggttgatatttaaaacgataattttgtttttacacaatagcaacaaaacaaaacaaaagagaaaatgaagtttaaaaaaaccaactctgtatgcagtaactataaacattaaatgctgaggaatatagcaaaagcttcacaagccctctactaaaaagatcataataatgctgagataaagaatgcctaagtaaatgaagagagatgccatattcatatactggaggactcagttttttagatgttggttctccccaaatagatctatattttcattgcattcctaatcagaattcaactagctcttacagtagaatttaataagaattaaaaagcccagaagaattagacatttcacaaaagaaggtatacaaatggctaataagcacatgtaaggaggctcaacatccattacttatcaagaaatgcaaagtaaaaccacagtgagataccaccatacatatcaggataggcaggattaaaaagatgacagtaccaagggttaatgagaatgtagagcacggctgtccaaccttttggcttccttgggctgcattggaagaattgtcttgggccacaaataaaatacactaacactaacgatagctgacaagctaggaaaaaaaaaaggtccatgcatgattttcatgctatctgccaccgccgatgaaacaaaacagtcctcacgttcaaagggatggacacgtcttacgtagagcattctaattaattgccatacattggaattgtcatacactgctggtagcaagataaaatgatacagtcactttggaaaactattcagtaatttctaaaaagttaggcatgtgcctataatatgacccagctcttctactcctaggtgtttacccaagaaaagtgatacacgaaatatatgtccatgcaaatgttcatcaaagctttattacaataatcccaaattcagaacaatgcaagggtacatctttattatagtagtccatcagagtcaaatggataaacaaattgtggcatatccatgtaatggagtgttattttgtaatacaaaggaacatctgatgtatgcaacaacatgaatgaacctcagaaacattaagaagtaatgtttctgagtaatgaaagaaacccgaagtaagagtacataatatgtgattctatttgtataaaaagaaaatgcacattaatccatagtgacataaagcaaattattggttacctggaatcaggcacagggaagggtacatgtcaatgcccttggaggaaggggcgtgtgaaattttgaggactgatggaaattttgtcttggttggggggggtggtggtggttttatgcacatatacagttgttaaaggtcattgtattgcatgctttaaatagatatggtttattctatataaatcatacctcaaagttgcttaacaaatagtgactgacaaaggcatgacagaaaatatgtattcagtaaaaaagctttattgatgtggaccaattctagttactagttcacattttcatagcagataacaatcctattcagaatcaagtagcagccaaatatgttaagcaaataaaagacttcattgtttcttaagctctttgtagtaagaaggtataacagtggaatctgttagtcttgttttggttctggagcttggatttcctgtgttccttctcatctttgttccagtatttacttccaagctcttctaagcttatgacctggaattatcaaagttggttttcatcatttgggaagtaaaacaccatttatttttgagctttgaggagtctataactttaacaaacttccctaacagttcacagtcttctcctctaagcttaactttagtttcataatttcgaatatggatttagacccagcaactataacaaaaggtccatgacttaactatatagtttttaatgttaggaaaagtaaatgaaaaatcttgcctgtatgggacctcacatgatgttgtaataatcatgagctgcaaaaattgtagtgattccctcccaccccatttttaaaaaagcggtggcatctttagttatataacagttctaatgtaaattaccaggttatttactcctctaacaatgtcatcatttttggtgttgctgtaagctcctctgctacttaccttagttcaaacttttttttttgtttcccattttcattcagccttttcaaaatatatttgtcagtgtaccttatccaataatacttaaggattttcttaaggctgagagaaataactttagaaaatgtgactatcaaatacagatgtttaaacagttatgatatttaagcctgtaaacggttaaagaaaataacagcttggtcatggagttactcttccaggctctcctggcaggtgagtcgggtcttaggaccttgggaagaatgttgtcttaaattactgtcctgaattaagtttccacagactttctgatgttaagtttttttcagaattacagaatgatgaaaagccatgtctttagaatttttcttatgggaatctccaccttaaatttaaaatcatttttaaaataaaggcccttaaaggagagttaagggtgtagacacaggatactgttggatctttgccatccacttgaaaaattgaatgtaaggttcacctaatttcagaagaacactcaaactttgggtatcttaggtgtattgtaacaggaactgactggcttaggggagtttgaagcttgggcttagggaggttagctttcttagcttagggagctcagaaagatgtcatagtagaggaatttccctgtcttctgagccattgaataccctgccctgaaattgagtgaggtgaaagtaattgacaggttgatgaaggtgatgttaggcagaaacagtgaggaggcaaaggtggaaattccaaatagccactagaaatgcgagaaggcaggttttgaggaatggactgggctgcagatcagggcactgcttttataaaaaggctggcacttgcccatatgcaccgttcctgatgtccactggccaccacttgtggccaaccacacacacacacacccttgactaacagaactatttgtgaaataattgttctcattaattgaatattatggttaaatgaaaattgaccaggaaagtagtttttgtttgaagacttacttcaaataaatacctttccagatgtccacattcctgtgtaaattgattataatgatcattattatcttttttacttgaggcatcattctcattttgaacatatctaggttatgttcttgaagggacagtcttttatttgtgttttcttggcacttaatgcatcatatggcccagctaacacttgtaggaagaacatttgtcatttttcaatgaagataaaaaatgtatggtagcctttttttaaaaaaaaaaatttgaggtgttatttattgtacccttctacattgagaattaaaacacaacatataatctattgaaacttgaggtagataaaattctagctctttttcacacatggaactttatacaaagttatcttctgactttctgttagatgaaatattgtagacctggttccatgatcacatgttcaccttaggtttttaagagttttttttcctttaaataaattatataatgtgataaagccacagcatcttgttttctgtatgattttgaaagcaaaaatgtcaagtagtaactatatcaaaacttaaattatgtgcattcagcagagagcagaagttatttccaaattgaggtgtaggaagctttaaaatgcttattcatcctttatcagcactagtgaatgaattggcaatttcctaaggtcagcaaacttttattttgaatgataacaatagtattatttctaagaatatagaaaaatgcaggcgtaacacaggagtccaaatttagtattaagttaatagaattttagattctggaaggctggagtgtttttaggtttgagaaatgttagaaggtgcatgatggatgttagaggacatgaaggtgccgttcttgtctgatgtagttgttacgtagttattgggtaaaaatggattgctgaccacttagatggtttccaggattaggagaaatgattttcagaacacttctgtagtgcctcatgctaatgaaagcaaaaggcaaggtgttttcatgactgtaggtcatatatattggccatgtttatagttgccagtccttgctcttttttggcctgttgttgcaggtatgtctttgacttccagagggatgagctggcctcttttttgtccctcaagtcgctggaaaagctgtccaagaaattttctctgaatgcttggctcagtggcattgttccacatatgttggaataggtgactaggctgtgtttggaagaagatctagattggggtccccaacctccgggttgcacagcaggaggtgagtggctgtccagtgagcattactgcttgagctccacctcctgtcagatcagcagtagcattagattctcacaggagtgtgaaccctatggtaaactgtgcatgcaagggatataggttgcgcagtccttatgagactctaatgcctgatggtctgaaacagtttcatcctaaaaccattgcacccgcccatgtggggaaaatttgtcttccatgaaacccatccctggtgccaaaaagttggagactgctgatctagatgatctctgttttgtttctgtattaaaaataagaaattactaattcagcagcatgtacctgtgttggaccaggtccaacaggtatgcttgggttatggcagggaacaaatcagacaaagttgtgacatttaaacagagaactaaaaggtgaggcattagctggctgaagagtagaagtccagatagtggccacagtgtatgtggaggccctgaaatcagtaggagcttggggcctgtggagcaggaaggaagagacagtgaggctagagaatagcaagaaaggggggcaatggcttgagataagtctggattaatggatggaaaacccaactacataggacttgaggacgtgttaaggattttgaagtgatatgccatttatttggaagatgacgtagggtttttgttaggaagagaatacattggagggggtcaagaggggctttaggggtataaggcttttgttaatattatcaccactaataacagctaatattatttgttgctgtagaccaagcactgtgctgtgaacccttttcccacatcatctcatataaacttcagaacatctcagcgaggtggtgttttctctactttatagatgagggaaccgagacagtgaggttaagcaacttggccaaggtcatatagctagtagtggcagagctgggatttgaacccagacagtgtaagattgtaaattctgagactctaaatcctgtggtgtttgccactgggcctgtatttttcattgcgtaggtgatgcgcctatgtgggtcttgaaattgagtggatcgcaactgggatttaaaaaaaaaattgaatggagtagaaagtatcagactacttgcaagtaataagcataaatattgatatgtgaaactttattttatgtaagtaaacttgtacatttgtgagcttgtgagctgttatagaaggttaaacagcatttttccaggcaggagctgatgatggcttggattagagttgtgctgatgccgatggagagaggtggaccccagtgctaagaggcagaggcagcaggactcagtaagagattggatagaggtgcccagctgaggaaggaatgaggagtgagtcccagatttcttgtatgaacagcatcagtcatggtgcatgctgtgctcaatccacttgaagggagactgatccttcttagaggggtcctcctggatggctgttttactacctgaatttctagtttctctcagctgcagctgacaggacttggggttggcatctcgcccaggggcagcaaatctgtaagctagctctcaacccatgagatgatgtgttactgaaaactgcctaaacagatgttgagccaataattaattctctggaatttgaggtgagtagtcagccagctggtggcaggatgagaagcggtgggccacagatgtatgtagttgactactagcagctctagggtgaaggtgtaggaattatttgtgtggagtcaccttgagattcaaagaacctttagatttccgtttctaaggcccagagtcattctctttctgaagctcaggtccaattttttttttcttgctctctctgcggtccatatctgtattctcaagcataaccttttagtcatatccagctccccacattgctgcagtgaatctccatactgtgcgttcagctagtactaactggagacagaatgatggagtagttaaaaaaaatgtctggtggcaattctccatctttgtcttattggtcttttgatgttggccaagatacttcttactgagccttggtttccacatctgtaaaattgggatgatagaggagcatcacagggctgttttgaggcataaacgagagaaactctatctagcacttagctcagtgcctggtgaagaattacagcttaataatcttgccattgatagttaacatctttaggatagtctctggagagacttaaacgtgttcattaacaaacattatgggaaggagccagcatagagggagaggttggatatctatgagacagggtcttaagagaaggtattggatcccagagaagcaggcatggcacgggattaagagaatacattacagattgttttcaacagaagagggaacctgatggaggtggtaggaggactgttttttctgaggttgggtcccagtcatggtgatttgctaggagagatgctgatatcaggaggagaaaagtggcaaggtggaaagctattatagagaacaggagacagggacataccagaaaactggtgaacagtaccaagagcctgcgactgcacattgtaaatttataatgacaccagtctgtgtatttctacagtgttttctggcagtgctgtgttcaaaagaatgatgagctatagaagtaagattagtatagttttgaagggtgtgcatcctagataccaggaaagaataaggaggctgggagcgtgggtacagggacatagtagggcaggtggtcagccatggagtccggcttggttgggagggcagtgtgctctgggcagggtatagtcttgaagaaagaagagggcagtggtctgtgtgtggtgccacccacaaaagatatataacttctttgattgatggttttccctgttattcttaacactaatttcttgtgttgataactgaagtattaagactaattgctaaaaataaatttatattctcgtatgggccaaaactggagttagttctagtgtttaattttgaagttaccagtgatttcgtgtggtatgctgaatcagtaaataagttgtgatccttaaccttgggactgaacttcagtagtccttatttctcctttcatttttgtttggagtgtgtagcaaatctgaaagcagtaccatttactcattcactgaccatttgaaggcttcccatgtgtcaggagaacagaagtgaatgacgcagggatgataccgtgaggcatcacacggataaaggccaataagctcctcacagtatcatcctttccggccgtagggtgctggaagacaatattagaacttctcttttaacctgttactttgaacttctgtgtttctcagaacatatatatcagaatagtagcacatgtctgaaaaatatagataagcatacacgtattgggggtattcttgtttttggcagtagtgtgtatgtgatcaaaaaatatttggaggctattatatgttagtatgtattttaaaaaaatataaaattataactttttcttagcattttgagaaaacctagtttctgcatgtaattaatgaggtagttttacttgcctgtatttgtagtgtgaagtaaatcttactgtataaaaagacttactaccaagatctggcttgacacatttcagtcattttcttcttggtgctggaggaactttaccttttgtagaacagtgtcccttgttataaaacactaaattcacttgccatctatcagatgttgaggaatggggtgtggagaatgtggaacagcacatgcctgttttactatcagtctcatcccaaggtgtgacctctggggaccttccttcttacctctctggctgtctctcctgccttctctctctctctcaactgtctcaaaacaataggattgggatgccaccagaaattccctgctcccatctgtttgctcagagtaggtggttactcagtgtgtaatgtctcactttcagagagccatgaaatccttggttcaaaaagttccctcacaccaagaatcttttccgtaaaattagttagaaaaactgctatcaagaacctattttaaatgaagtatattgaataaatgcctctaggttgttcctctggaggttttttattttcatttttgttttaatgagtatgtatcttagcctgtatttgacactgtcattttttaacaagatgttatttaagtgaaatcttgcatgtgtgtttgcaggttgatgataattagaagcatgctttccactgaacttcccgacaacatttgttatgcagaatgtctctgagtgagaactcggtttttgcctatgaatcttctgtgcatagcaccaatgttttactcagccttaatgaccagcggaagaaagatgtgctgtgcgatgtcaccatctttgtggagggacagcggttccgcgctcaccggtccgtgctggcggcatgcagcagttacttccactcaagaatcgtaggccaggctgatggagagctgaacattactcttccagaagaggtgagagatccatgtttttggcaattttaatctacttttacttaagttttttatggttcataatgttgaaaataaagcacagtctccttgtcaggtggctatggagcatttcccaggttctgtgcaaccccttttttttttttttttagtttttttaatgtaaaatcattaattttgaatgttggttaacattactgagcagttggatataacataacacccactgttatgttatttttgatgaaatgaccaaatcaggacacgcccagtggattgtaggcaattggaaaagtcatggttttgagagtctgtgctgtgtgacattctcttctaggggccctttccagtgatcagcaattgtagctatgtgtgttagtctgttctcgtggcgctaataaagacatacctgaaactgggtaatttttaaaggaaagaagtttaatcggctcacagttgcacatggctggggagacctcacaatcatggtggaagacgaaggaaaagcaaagggacttacgtggtggtgggcaagagagaacttgtgcagtgaagctcccccttataaaaccatcacatctcgtgagacttattcactatcaccagaatagcactggaaagacccgcccctgtgattcagtgacctcccattgggtccctcccatgacgtggcaattgtgggagctacaattcaagataagatttgggtggggacacagccaaaccatatcactaggtttagggttctgtaaaacgtccgttttcccaagacatctcctatgaaaaggaggcactccatgagtgttctgtctccccttctttcttgacttagtctttatgtattgattagaaaaaataaacagtgttgcgtcatttttatatagccttatttttacatacatctttttctctggtctgttgtggagctcaggctaacaaatatttgggtccttgttaatgtcctgcctttcagaggaattctcttttgggtggggatgtgctggctgtgctgactcctagcagcatcccttgctttagttagtaactgctactagcagagtatcaaggctgtggcattgggacacaaatagaagttaggaggaatatggagaaagaatgtagaaatcatttgagtatgacaggtctatgtgggatattcccagttggatacggttggataaactgtaaactaagtctacagtttagcttgttgctgtccatgcctacttctgtgaaactgcagctacggttttgggaacaggttgtctgttagttttgtagcagaggtcagagtcaatggtgcaatatcaagaaaatggtaaaaaaggccaacctatgaactagccattgttttaaaaaaagaacaacacattttataatggagatgtattaactatggttcatattttcaaattattgaatgagactttacaagtaaagcaaagtttgattcgtggatttaggaggaaaggtatgtgcatacatgcatgtgtgtatgcattcattcattctttctaatgtgtaaatcataagttttcaaatatttgaagtgtttcattatagtgacaatgtcaaaataccttataactcactatcctaaagacctttttagattattttaacatatttaaaaattttaattgaaatttttatcgagtgtattagggttctccagagggacagaactaataggatatatgtatgtatgaaggggcgtttgttaaggagaattggctcacatgttcacaaggtgaaggcccattataggccacctgcaagctgaggaggaaggaagctagtagtggcccagtccgagtccaaaggcctcaaaagtagggaagccaacactgtagagccttcagtctgtggccaaaggcccaagagccctcggcaaaccgctggtgtaagtctgagagtccaaaggccaaagaacctggcgtctgatgtcaagggcaggaggcatccagcaggggagaaagatgaaagctggaagactcagcaagtcacctatcccacctttttcctcctgttttgttccagcctcgctggcagctgagtggatggtgcccacccatattgagggtgggtcttcctctcccagtccactgactcaaatgttagtcttctctagcaacgccctcactgacacacccagaaacaagactttacagccttcaatccaatcaagttgacatttaatattaactgtcacactgatgttttcatgtacagatgtaagaaacaatgcagagttccttttcactttgtccagtgtccgccattgataacattttgcaaaattgtagtatagtattacaaccaggatattgatacaatctcccatagcgttcagattgccacaattttgcttgtactagcatgtgtgtgtgcgggttaagttctatataattttatcccctgcgaaggtttgtgtatccaccaccatagttaagataacagccgggcccagtggctcatgcctgtaatcccagcactttgggagggcgaggcaggcagatcacctgaggtcaggagttcgagaccagcctggccaacatggtgaaaccacatctctactaaaaatacaaaaattagccaggcgtggtggcgggcacctgtaatcccagctactcgggagactgaggcaggagaatcacttgcagtgagccaagatcgtgccgctgcactctagcctgggtgacagagagagactctgcctcaaaaaaaaaaaaaaaaaaaaaggaactgaacttgccaacacaaagatcccttgtgttgtccttttataaccacagacatctcctgcctacactccatgccctcatccccttgcccccttcctccgtgcctaatccatggcaaccactaatctttcttccttttctaaagttttgtcattctaaaaatgttatataaatggaattatgcagtatattacctcttaggattgatgttgtttgacttagctgagattatccagcttgtgtgtatcagcaatttattcctttttattgctgagtaatattctgtagtatggatgtaccttgtgtgtgtgtgtgtgtgtgtgtgtgtgtgtgtgtgtgtgtgtgtagctttttacctattgaaggaaatcaggctaattctggtttttggctatcacaaataaaattgctgtaaacatttgtgtactggtttttgtgtgaacataaatttgcatttctctgggataaaagaccaggagtgcagttgctgggttatatggtagttgcatgtttagttttataagaaagtttttttcaaagtgtctgtaccattttacattcccactagcaatatgtgagtgatttagtttatcggcattctcattagcatttgatggtatcactgctttttattggagcctttaaaaagcctaaacatggtttagcatgtttatgtttttaagaagatcacagccgggcgcggtggctcacgcctgtaatcccagcactttgggaggcctaggcgagtggatcacgaggtcaggaaatagagaccatcctggctaacgtggtgaaacccccgtctctactaaaaatacagaaaaattagccgggcatggtggcaggcacctgtagtcccagctgctcgggaggctgaggcaggagaatggcgtgaacccgagaggcggagcttgcagtgagccgagatcgcgccactgcactccagcctgggcgacagagcgagactccgtcttagaaaaaaaaaaatcacaaatattaatattatcttgaccactcttataagaactcagtggtttcaaattaattttgtgcttttaatccaggatgatgccttctgtgtactggagttggttccatttgcctctcactttaagaggcaggtttaatgtaaatgtgcaagtttctacttaaaagttttgttacttcgagtccatgaatttttgctgaaacagtaccgaggcatgatttttataacttctcttagatcacttttaaaaatctgaatctttaaaacttttactgttaggaatttttgacagtaaagttaatagttaccagttagtatgcatttaccatggatcaagactttgtaactgctttacaaatactgttttatatcctttaaaattctgcttttgtagcttgtagcagttggagttgtttggaatacagtggccatgtggagctgggctagcagtagactcactatgtgtggcaggtagtgttcatcctgctctaattcatagatgattttttttttcactatcatgggaaaattgtggtaatgtcttacatctttaacttatgtgagtaaaccataattcatgtgcaattaagagaggactctataaaatagtgtgtggtccctgtgaaaagcatgcttttccaggatctttttcttttacatttcttagaagaatatgttttcttcaaattaaagtacatattttataattatcacaaataagttacatatctctctattcctcttctacttattttgtttttatgtactagacagctttcaaatgatgtgtttgtttttattttgtgtatcaacaggtgacagttaaaggatttgaacctttaattcagtttgcctacactgctaaactgattttaagtaaagagaatgtggatgaagtgtgcaaatgtgtggagtttttaagtgtacataatattgaggaatcctgctttcagtttctgaaatttaagtttttggactccactgcagaccagcaagaatgcccaagaaaaaaatgcttttcatcacactgtcagaaaacagaccttaaactttcacttttggaccagagggatctagaaactgatgaagtggaggaatttctggaaaataaaaatgttcagactcctcagtgtaaactccgcaggtatcaaggaaatgcaaaagcctcacctcctctacaagacagtgccagtcagacatatgagtccatgtgcttagagaaggatgctgctctggccttgccttctttatgccccaaatacagaaaattccaaaaagcatttggaactgacagagtccgtactggggaatctagtgtcaaagacattcatgcttctgttcagccaaatgaaaggtctgaaaatgaatgcctgggaggagtcccggagtgtagagatttgcaggtgatgttaaaatgtgacgaaagtaaattagcaatggaacctgaagaaacgaagaaagatcctgcttctcagtgcccaactgaaaaatcagaagtgactcctttcccccacaattcttccatagaccctcatggactttattctttgtctcttttacacacatatgaccaatatggtgacttgaattttgctggtatgcaaaacacaacagtgttaacagaaaagcctttgtcaggtacagacgtccaagaaaaaacatttggtgaaagtcaggatttacctttgaaatccgacttgggcaccagggaagatagtagtgttgcatctagtgataggagtagtgtggagcgagaagtggcagaacacctagcaaaaggcttctggagtgacatttgcagcacggacactccttgccaaatgcagttatcacctgctgtggccaaagatggctcagaacagatctcacagaaacggtctgagtgtccgtggttaggtatcaggattagtgagagcccagaaccaggtcaaaggactttcacaacattaagttctgtcaactgcccttttataagtactctgagtactgaaggctgttcaagcaatttggaaattggaaacgatgattatgtttcagaaccccagcaagaaccttgcccatatgcttgtgtcattagcttgggagacgactctgagacggacaccgaaggagacagtgaatcctgttcagccagagaacaagaatgtgaggtgagcaggaatatgttcttaattcattgttttaataaccattaattgggatttactgtggatcagctccctttgcatcattagggatataatcaggttcagggagtggggaggaaactcatacaaaattaattgtaagactgtgtgatagggctgggcgcagtggcccacaactgttaattccagcactttgagaagccgaggtgtgggtggatcacctgaagtcagaagtttgagatcagcctggccaacatggcgaatctccgtctctacaaaaattagctgggtgtggtggtgggtgcctgtaatcccagctactcgagaggctgaggcaggagaagcgcttgaatgtgggaggcggaggttgcagtgagccaggtttgcaccactgcactccagcctaggagacagagcaagactgtctcaaaaaattttttaaaaacactgtgtgataaataccaaaagagagagatgaagtttgaaggacttctgttcattcgtttccagtagatatattaaccataaagtaggttcacacattggctgtgttcacacatcggccatttaattgtttaaatcaaatgccatgctgcaagacaaaaaagaataatgattctatgctcattatttgataactcctggaaaaatgcagcatatattcagtcttgctcattgccaacaagaacctctagacctgggacatgtccctgagcagtggtttaacagtgattagttgtaggaatgtgacttctagtggagtaaagtttattggatctagtttttcatggccattgatttttaaattttcctttggccatttcaactattgatgaatgtcttaatttagcatgagttacatgtagctggtatgatattaatcaaagcaagcttgatttgtatattctgtttgtatttgatagatcctttctgtaaaatattacttataagtccaataatgacaagggcctgttagttccttccaaaaatatattaattaaaatattttttcttttttttgtttttatattttatgattttttttgcctttcaatagttggcttttctctttataatcacaatttacattctttttaaaaattatttttctattttatccattgcattttttcccctttcttgggctttatttgttttttgtaagaatacttaacatgggatctacccttataacaaaattttaagtgtacgatacagtattgttaagtataagcacaatattgtacagcagatctctataacttattcttttatgactgaaacttaacccatccaattgcaattccccattttttccctctccctagcccctggcaaccaccattctactctctgtttctgtgagtttgactgttctgtctacttcgtataagtgaaatcatgttggatttactctcctctgtgtctggcttatttcacttagcatgatgcctcccaagttctccatattgtaggcaaatggcaggatttccttctttttatcaggctgaatggtattcctttgtgtatatacaccacgttttctttatccgttcatccatccatggacatttaggttgtttccatatcatggctattgtgaataatgcggtaacgaatatggcggggagtacagactgggcacagtggctcatgcctgtaatcccaacaccttgggaggctgaggtgggtagattgcctgagcccaggagtttgagatcagcttgggcaacatggtaaaaccccatctctacaaaaaatacaaaaattagccaggcatggtggcatgtgccagtagtcccagctacttaggaagctgaggtgagaggatcgcttgagcctaggaggttgaggctgcagtaagccatgattgtgccaccgtactcctgcatgacagagaccctgtctccaaaaaaatatgtgtagatcagtgcagatatccttttgagattgtatagaaattgggatagaggcctatgttttctttaatgtaaaataagttctctgaaaaacttagatgtataccttcatcttcctaggtttgactataattataaaatacagcaataattagtaatatttatttcatattctaggtaaaactgccattcaatgcacaacggataatttcactgtctcgaaatgattttcagtccttgttgaaaatgcacaagcttactccagaacagctggattgtatccatgatattcgaagaagaagtaaaaacagaattgctgcacagcgctgtcgcaagagaaaacttgactgtatacagaatcttgaatcagaaattgagaagctggtaagtgtaaaagtttcttgttactatttaaattccaccactttcttttttgtcaaggaaatagtttttaaatttctaggtcagatataatgctcaattacttattttaatatgtatcaattaccattttatcatttttaccatgatatgctgtgatatgtaagtgctttttaaaaagaaggttttcaaattaagaatgactttactgtctacctaatcattagtggttgtgaatagattcaagaaattataaagcactttaggttctctgttttgtgtctatagaagttaatattccaggtgttcatttaaatgaactgtggacctgaataacttgttttggttgataccaaaaccagaccaaccaggatctttcatctaaggaaaaaaattctgatagatatggtgatatgaattgaaaatattaatatctaatgggatcctaagtgagaacaatgcttgcttttgaatcttttctttttcttttttgagatggagtcttgctttgtcgcccaggctggagtgcagtggtgcgatctcggctcactgcaagctctgcctgctgggttcatgccattctcctgcctcagcctccggagtagctgggactacaggcgcctgccactgcgcctggctaattttttttttaatttattttttgtatttttagtagagatggggtttcactgtgtgagccaggatggtctcgatctcctgacctcgtgatctgcctgtctcggcctcccaaagggatttcaggcatgagccaccgtgcctggcctgaatcttattttctattccagcatcaagacacaaattaactgaaaattgattagtttactcctctttcttttttccgttggtggaaggaagcattgtatgaaagaggacaactctgatagtacaggccagctaaagctaagatatggtaaaagatagcaaggaaacagcctagaagtagtaaaaacattgcttgaatattcaattttgtgtctattaattgttgaaagtttaaaagttgggattgtggcaagttttcaagcgtgaacattctagctatgaatggcaattaaacagcaacaatttagggaaaaaaattgtgcctccaggagaagttgaaaaataaaaaattattatttatatattgtacatatactttgtgtaaaaagataaaaaatcataactatattaaagagatgaagcataactaaataaaaaatagaggaactagatgttttacaaatagaggcatgagagatgttaaaaaaaaaaacaaaaaacccaaacaccgacatgatattgctgaatagttaaaattgttaaaaccaaggaggaaaagttttcaattctatagtacttagtacttttagagtgtgtatcagtaatacctttaataaacactggtgttctttcttattcagttttgaattaaacccttacctgcctttagaaggagtatagcattttgagcttcagtttttattctgtgctgcaatacagagatgctttttacactgttaggttatgcgaagctagtggaatgaaatctacataaaattgtactactgaagttcttagttatgcttcttagttctttttcttgctctttctcgtctgccagctataatttatagtagttcatagagtttatccagttttcttactcctctaaaaataaaaataaaagcgaaacaagactattctagtttatttcgtaactttattttataaatggatactaagcaaatatgtttgagagtagctattatcctttagaactactctatttcttggctcaagggttttatttttttgatacaaatcagacattggtttgctagattattgatattgctactaaatttcagatatctaggatgaagaagccttgctatctttgggctttcttctccctctgcctttccttcttagagaggtggcagatacagtggttaaaattgtgggctctcaatcagatgcttagtaactttgggcaggttaatttctctgtgacttggggttttcatcggaaaaataggataatactagttcctactttatagattaggtgcttatttgggggaattaattgagttaatccatctgaagaacttagaacaatgcctggcacgtagtaactactcaataaatactatgtattttttattattttccattttctactttttaaaaaattttatttggtttatttatttatttatttttagacggagtcttgctctgtcacccaggctggaatgcagtggcatgatctcggctcactgcaacttccgcttcccgggttcaagcgattctcctgtctctgtctcccgggttcaagcaattctcctgcctcagcctcctgagtagctgggattacaggcacgtgccaccacacccaactaattttttgtatttttagtggagaacaggggcttcaccgtgttagccaggatggtctcgatctcctgacctcgtgatccgcccgcctcagccttccaaagtgctgggattacaggtgtgagccattgcatccggtctccattttccctttcttaattgaccttcttcctaatgtctctgcctaaactgtaaactctgtgtttggtatattgcttctgtcatcatagtaaggttcctttcatatggtcagtgaataactactggttaattttcaatacaaagtaatattttgtttctcaacagtttttatgaaatccaaaatctgaatggtcagtatcctgtttaactattacattaatttggactctttggcttcaagaaacagacttttgattgaagaatgaatgaatgaatgaatgaatttgttgtagggagataggtacctctcatttagaagctagacaatggagccaggcctcataaataacagggaacagaagtggaagactcctgggaacccagggacttctctgtgcacccgcttcgctctctatccgagagtggctttgtgtgtcactaagtgcacatgggaagggtggctgtggcacaatgcctgaataatttcactctctccagggactaatccagtcagagactactgttttagtcagttctgaattcccaaggagagcatcttactggctgaattcactcaggtatcctcttctgtgactagcgagcaagaacaaaatagaagagtcaagaccctcctttctgggcaggcacagcagacatctgatagtgtctcctgcacctagataggcgccagtctgacttctaaaataaccccagagaagttgtgttggaatttttgtatcagagtgactcatttgtgtttcatcttccttgaagtctctactcagtccttcacactgctctcagttctagtgatttgtactggcaaactccagttgcagcgtgaggggtacattacaaatttctgtactgcgtagatgtctttctcagataaacataaacagaaaatatgctgcttattagctaatacgaataagaaagctggcccgtctagaaggaaaagaatttgacgtttaagatagttattatggtaagaagtttacttggaccctggttgttgggtgatgttatggatcttgtcttttgtaaacagaaaactaggagggttacagccagaggtttatacttagtagcatggagagttgagaaagaggaaggaatgtgaacagatatttgtgtatattttaatctcattgagatgttactttttgaaagtaacatggccaataaacaagcagtattcttagtctttatagtctaaagattataacaaacctatttaagggaaattgcttgtttaataattaaacagccatttgcacatagtgaatgactggttggctttaacatattaatagattcacagtatttattgctcaggtctaaaaatattcatgcagagggccctatattctagttagtttggtcttaggctattggctgtttgttttcctagaaagaaatcttggaactttttgcagttcgtcctgagggcaatggcataatagattctggatggatcagcatgtgataaaaaggggtttgattacaatagaataattattctaaaatgtttgcaaagtgggttagtattataattatgtataaaggaataaaggacacttttattaaagtctcagtgtgttgggacaaagggagatgtgagttagcatttagtaaataaggtatttctcaacaagaagttctgtcagagtctaatagaacctttgaagaaaaggtgtttatttatttggtggaaaaatggatggtattgactttagcatttattttgaattttatagtatgttagaggttaagcattaatttagcattgcttttattacaagaactgaatgcgcataatgcataagccagtaacatgactttggttttttttgttattttttttattttttttatttttttttttgaggcagagtctcgctcttttcgcccaggctggaggtcggtcttggctcactgtaagctccgcctcctaggttcacaccattcacctgcctcggcctcccgagtagctgggactacaggcgctggccaccatgcctgggtaatttttttatatttttagtagagacggggtttcactgtgttagccaggatggtcttgatctcctgacctcttgatccgcccgcctcggcctcccaaagtgctgggattataggcgtgagccactgcgctcggccgacttttaaaactaacaattataaagtctttggattcagcttctgttcagtgtttaacttatgaagctcttgtctatgtagctttctttacaaggtccaagtttattcttttctggaagattaattcagaagttagaaaatatacatatctctgataaccattttaacctcagaggtaccctgaaatgaagggagcctcgctttttgcagaaaaatatttaccaaaatgtatttcttttagaaagtatcaaatattgttttcgatatcaacttgtaagtgatcagcaatcagaatattcacaaacacttgcgctcagggttgaggtgttcagacaccattttatttcattacttttgtccattatgatggcacagaagtaaaacgacctcatccgtccttagtgatttgcattttgtggtgaagattatattttattaaaaataaacctgtcctattcacaactagtcacaatttactggctgctcaaccaaagcgcaccccagtggcccttccggaacctgccctctgtcattccgtgttgtcgttgagcagcatttcttgaaatgtggtgtgtgtcccattggcatcatagttatcttggggtgccccttaaggtggacatttcttagtctataccagagctgttgttaaggccctggaccttgcatttgatacaagtccaagataaatgtcatgtacgttttaaattctgagaactcactgcatgatagcactgaggtcagacggaggctttggagacaaatgactggaaagcctgcctggccactgggtagctttgtggtctggggcaattgcttaacctccagtacccacattcccccgttactaatgtgggataagagtaacagccacagcggggttgatgcaaggatctgatgagatcagggatgaaaagctgtttgtactgcccagcacgtgttcagggctcaatatgtattagttgtactttaaataaaagtggttctctattcttcctataagtatttgctggtgaccctacatgttaaatgttgtgcttggtaccaggatgtcagaaatgagtaagacagaatcctcacttacttacagtctcatagggagtcaagttcaagtgtgttcattttttcttgagcttcatgtcagcaccccccaccccattctaaaaatttcaagctttcagaaaagttaaatgaatgggtaccataagcaaccatatactctgcatgtagattctttgatttttgacattttgccacatttgctttatttctctatcttgatctttccgcctttgtctctccacctcagatcatctgtctatacctgttggtttgtcagtctttgcacctctatctccgtctatccatcttggtccttttttaaccccacttggttgatcttggtctctcaccccttggtgtcactgttgttcctgtcctgctgtcttgctggctgtcattcctcactctggctctcttcctctccttttattttctgaattgtttgaaagctaccatattatgacacttcatccttaaatgtttaaacatgcatcttctaaaaagaggcattcttagatatgactaatacctttattatgcctgagaatttcaacacatcctaaatattatatctagtttttattcaaattactctgattttcccatctttcatagatgcttttttttcaaacgaggatacagtcatcgtataatgcatttgattaaacctgtttagtctcttaatctagaacaagtactctcattgttttaatgacaataactttttgaagtatccaggctggatttctcataaatgtcttactttaagttatttgtctgattgcttccccatggctttaagtcatttctccatccctttacttcccgtaaactggaaatgtttgagttgaggagactgagtttaaacattcactggtgttgtcctttatattgtgtcgcctagggaggcaggaggtccagtgtcagtattgtcgtacctgggtagctgggaagtgccagattgctccattttcaaagtaatattttttcaacctgtgttgcttagttatctatgatgtgttacttgggcactttataattatcccgttccccaatactcctgcatcctttagaatatgttgatgaccttcactgtgattaccatgattacaaaatcatgatttttctaaatctttcattctatttacattattttagttggtattcctgattaaaaaggattgttcttcctttctttctcttttatttttttatttttttttgaaacagagtctcactctgttgcctaggctggagtgtggagtgcagtggcgtgatctcagctcactgcaacctctacctcccaggttcatgtgattctcctgcctcagcctcccgaatagctaggactacaggtgcccaccaccacacctagctaatttttgtatttttagaagtgatgggttttcatcgtgttggccagcctggtctcgaacacctgacttcaagtgatctgctttcctcagcctcccaaagtgctgggattacagacatgagccaccatgcctggccttttcttgttttctcttttccctccctcccactctttggaatcacagtggactcatggattaattttttctgattcaatttgttaggataagtaatagtcattattctttttgatgttgacatttttcaaatttggcctgggagagcccgttcaagccagctcctgtcctgttgacataaccatctagcacttgccatggtctcactttttaacctctattgtttcaagatttggaatcacccatttctttaaaactcctggtttcttctagcagttatattggactttggaaagcctacctgctgctggagtattattccttctgggcctttttcagtggacagagctaggaaatatatgcatctgtgtataaaataaagttcattatatcatgaattcatatatatcaggcttcagtaaatgaaagtaaaaagtacattagaaatcctgagtttatgtagtatttccagtccaaatttagcagtatagagcttttgtcttcacttctgtgtttatgtttaatctctcatcatttacaggaaaaattttggctccaattacattagtgtattgtttcctttataatatacagtaagttctcacttaacatgaaatgatggataatgaaaccagtttttttcctcatcaactttataatgaaaggatgttgtaaaaatgagaacacttggacacagggtggggaacatcacacaccggggcctgtcgtcgggtgggggagtggggagggatagcattaggagatatacctaatgtgccgggtgcggtggctcaggagttcgaggctagcctggccaacatggtggtgcaaacctgtaatcccagctactcgggaggctgaggcaggagaatcgcttgaacctgggaggtggaggttgcggtgagctgagatcatgccattgcactccagcctgggctacaagagcgaaactccgtcttaaaacaaaaacaaaaacaaaaacaaaaacaaaaaaaacgagttaatgggtgcagcacactaacatggcacatgtatacatatgtaacaaacctgcacgttgtgcacatgtaccctagaacttaaagtataatataaataaacaataaaataaaaaagaaaggatgtggaacaaaatgtttattgaggacctggtgtgcgttgtttctcttaaagtcagtttccaaaaacctgtcgatgattttaagtgagggcacactgtataaaaagtaagaaaattagacaatcagtattactattaacagtaaacaaattgagcagaatttgagatttatttgcttttttatgcttaaatatttcccagtgtgaagctttaaagttatttgaaatatttgtgttaccaatttggcatacaattaatttttttttctatttatattactgggatttactctacattttttgagacagggtttcactctgtcacccaggctagagtgcagtggcacagtcatgactcactgcagccttgacttcttgggatcaagcaaatcctctcatatcagccttctgagtagccaggactacaggtgcgcaccaccatgcccgggtaatttttttgtgaaggtgaggtttcgctgtgttgcccaggctcctctcaaaactcctgggctcaatcgatcctcctgccttggcctcccaaagtgctgagattttaggcatgagccaccatgcctggcctacatttttaatttgttttattttgaatgtaaaacgtttatatggttcaaacattaaaactatattttaaaaaatatatactccaaatcttgatctcatcttctccttataccctattcatagctacttcctataggtaaccattttcattagtttctggatttttttttccctgtgtttcttttctaaaaatgtgttaacattttatgtctactcttattatccatcctgctgcatggaagtattttatatacatttttctgtactttttaaacttaagaattgatttataggaaatattttttcttagttcagagaggttgtcattcgttttccagctccatagtactcagtagtgactgtaatacagttcaaaccagtcttctgtgggtggacagttgggatcctgcagtgaataactgtatactgtttcatgtttaaggagctgtgtctctaggacacattcctagaagtgggattgttggatcaagggtaaatacatacataattttattagatattaacagattcccctccttaggaattgtcatatttggccttccagcagcagtatatgtgtgtgtgtctgtccacaccctcagtcaagatttgttgtcagcttttgggttttttccagtctgatagtgagataccatgatatctcgtggtagcttttatttttatcttatgagtgaaaatgagcatttttgcttatatttctcagtgccatttgcagatttctctgaactgccgttcagaggttttacttactaaggaactattagtgaccattttctaacagtgagtactctttaccctatcataaaattgtcacttgtacttttggtgccaaattcttctatatctttattgggtgagttatatttatgatctttaaaaaaattatatttgaataaatattgtgcactagctattcaaaataaggatttagatgcaaaggtttttttttttttttttttttgagacagagtcttgctctgtcacccaggctggagtgcagcggcacaatctcggctcaccgcaacctccgtctcccaggctcaagtgattcccctgcctcagcctgcccttttagctaggtttacaggtgtgtgccaccatgcccagctaatttttttgtatttttattagagacagggtttcaccatgttggctaagctggtctcgaactcctgacctcacatgacccgcccacctcagcctcccaaagtgctgggattacaggcgtgagccactgtgcccagcctgtaaagattttttgttggtataaaatccagaatggtaccagaatgccaattttattcctttttaagaaatagctctaattaaaggtgcagcacttcaaacgtgatttatacagttgtttttataggaaaatggaaatatattgtagggataggtagcaggacactaatagtgagtcccactcatgactgtaagtagtgactttgggaggtatcttaaatactgatgtcattaagtaattaacttgaattacttgtattttacttttagttattaagctgactgctattatagtaaatatgtgtcttaaacttagagtgaaatggaaactgcttagaagcttagctgtgtaggagttaaagtgcaggggaacagatgggaacatttaatttatagaaataattctggtggagttctagggctgtgcctatttgttttagttgttgtgaagaagcaagccatcttgtatacttaaagaatgatgtcatccctaatttagtggggtgggaggagtgagagtatttaaagatcatgtggatattaagatacagaagtcataaaatatttgtaatcttcatagtatctgtaggttaagtagtggttctaatttctgggaggaagctcaagtactccttattttgttgaaccatatttaatttaaaagaccaaccagcagttgaaaattttctattgctgtttagaatagattcatcccaactttggtagaggagtccatggctgaatattgccatgagtgaagaaagattctttctcactttcttctggaagctttgttttcatcctcctttggattggcttctgagagaccataaaaagaaatgggtgttgattgcatttaatggttcctactgtgaacaagcagtaggtaccgttcttgccctttcagtatctgcagactcattttatcagaagagtgcaactgataaactttgcataagagaaaatgtactggccaaacattgattttgcttacatacacatacttaacacgcacattcttgacctacatctatttaaaaaaaaaaaaaaaaagaacttgtatataaaaatctgaacagattggagaatactttgccatataaaaatttagtattttgtatttattgtatattttctcaaaatattacaaggctttaaaatattttagaaataacaataattggattcatacataattttatagtaatacttttgtataaaaccataacaatacttttgtataaagcaaaattcgttttacccttttagtgacttttatgtcataaaagactaaaggatggcacttatagattagcactatgaactaacttgtctcaaggttaactggcagcctcaactctccagaacctgtcaatgaacagaaagcaaacagaacaacactgacttgttgagagttgtgataaatttcataagaaaaacgtttgactttctagcaagtgtttatttactcttttcttataaataccttgattatttggtttcctggctcataatagattagaagcaataagatgttagaacaagaaggatgaaatgggatgataatagaaaagacatgctgtcagcagtgataagtgacatggacaggaaggcaggaaccagaaaaacttttgaaaaattctgtggtagactttcttataggggtaatatcttaaaattataataataacaaaaatggtaattagcaagcacaaaattacccccccgaattcttcacactttagtaactcacccaccggctgtctctaggcatcttaaattcagtcccatcccttcagtgggtttgatgttgcttaaatcaagagaggtgttgtgtggattacatagctgagattgcatgttggaaaacatttagcacaatatctgtcagagaatctgctcaacaaatgctggtcattagttgaatcttgcaatgctttgagtctcagtaattaagttatgctaactgtacttttactttttttcttgtatcccatccaaaatgccatccatacctgttatgtacagtctgtaaatccagaaagctccaaaaaccgtatgtttgtcacaaactcttttgaccgaaaaactgccccaaattgacattagactacatagtctttatcctactttcttcattatttgctattttaatgtttacctagaaatgtaaagatagttgatagggaagtgctgccccaggcctgctagagaaattatgtgtgcacccatactgtctttccaaaacctgaaaaatgctttgtgccaaaatacatctgccccaagagttttgggtgggagattctgggcctttagtatttaatgtataattgaatggaattgaaaggataaactccatgtgatcttacttgatgagaagcccctgtatattatttgatcgccttggaaatgttgattgagctaataaacacaagccattgtgttctctttccccacttcacagcaaagtgaaaaggagagcttgttgaaggaaagagatcacattttgtcaactctgggtgagacaaagcagaacctaactggactttgccagaaagtttgtaaagaagcagctctgagtcaagaacaaatacagatactcgccaagtactcagctgcagattgcccactttcatttttaatttctgaaaaagataaaagtactcctgatggtgaactggcgttaccatcaattttcagtttatctgaccggcctccagcagtgctgcctccctgtgccagaggaaacagtgagcctggctacgcgcgagggcaggagtcccagcagatgtccacagccacctctgagcaagctgggcctgcggaacagtgtcgtcagagtggtgggatctcagatttctgtcagcagatgactgataaatgtactactgatgagtaaacttgcattcacttccttcaaaccatctaattttctcctgaagttttggcagcgtcttgaaagcctaatatgaccatctgttgctcaacaatactgtttttttcctttagtagtttaccataagggaatttcctttaagtcaaccatgatttctccttgatttctacaagagacaaagaaatgattttgcctcctggatatcagaaaaatccatgtgaaaatgtagtaaacctttaaaactcatgttttaaagaataataactctagtaataactcttcctgctattcagaataagtaggagaatgaaaactgcagcatatcagacagcaatttaacagcttgaaacatctacagatagttcctactaaaagaagtggcctgcagaagtttaataatttgacttttttctaatattttagtttgaaagaaaatttcttcccaagcaatgctaatagagttctattcttagaagcagggtgtcagctactgggaatatttttgtagagctgcattgtgaaaaaaagatggtcttacctgaatcttagggctttgttcttcggctcctaaaatcaggctttaagctacattgggaagatttagtaaataggcaagtggttggcctaagacgggggctgcttctcctcttcagtatggactctagaaagtctggctacatgaatagatttaagtgtcactttccctccctgccccccgcttcagtctctaccatatctggtcccatcatggacttcctatttcctggcatttttgtccctttggaagaagaaataggactcagaatacagtggcatgagtgattacactggcagcattatctcaggctccctagaatctggagagcttaccaacatgtaaagctgttcatttttccaccgtgggtcaccaatgccagaaaaccagacatcacggggaaagaatgttgcttactttttaccaggagtgcagttcatttttttcaccctgtttttgaagtcgtattattcacttgtaaaaatgattgtaacagataaaaaatgtatctgcagcaactctgcaggtttgtgaaataggatgaaactcaatctttttctattgtgggtttgcatttgaaaagcaggttgaatccttgctctcttctccaaatttggtgtggtataaagacacacaaatcattttaacttggacatttaaagatcagtcttagtgtttgttcagtcctgttacaaaatagataactgagcacctatcgcataacattttgcggtggcttttagccatgctggggttagatgtgtttgagagtcaaatgaaagctatggatcttctcagcaattaaaaaaaatgcatatattcacattcacagaaacattggcagaacccagttttaatggtacagaggagtagtttatagtgttgatttcaccaaaatcagagggctgaaagagacacttctatagactgcatcctgagcctagtgcagggcttgtctagctaatgtgggcagccaccacccactgtgtatgaacaagtctgaagcaagttggccttgcccttgagagtatatggggaccagtcttcatgtcttggagtaatttgtcaaatgttaccctttttgatcagggtgtagggggaggatattgctagtatattttcagtggtttgtatgttctctctgtcactgacttatttgtaagagaaaattagttggacttgtttattttctagtagcttttataagtacactcaagaatttgtcagggagaataattctgatagtgcatcccatactgcaaaagaatttgtgtgtgtgtgtgtgtgtgtgtgtgtgtgtgtgtatgtgtatgtatacatatatatctctccatataggtatttctttgatacttgtaattttaaatttcagcttcacgatataaaataatataagaacttctggtttacaaaatgtaaaatcttaagccaatggaacccttgatttcctacctcagtgtacacccaactattggttgtatcagtttgtgtatgtgcaaatgtcaaataatcttttgctttaattgctactgtacttgctttgaaagattacctactattttatgataaaatgtagttgtctccagagcttaaatataatttgtaaagcacttggtttaaatttctctctacctataaacagtttagcattaagggtttctattaatgacacagaattattggccaagtgtaatttcttaaaatttagcattactttaaatagccagcatgtaatacaagtaactacactacctcatatctacatgattttcaagttgtaatgcagatggacagataaaaaagattttacgtttgtcttttggccataagtgggaaagttttctgtatattgcatagcattacacatttatgcctattttaacattaacttctaaagaagttttttctaagaaaatgtttcaaggcaatattttttttgaggctgccgaagacaaatgacaggattatgagtatacagtgtatgccttttccttcatgcagaattttgaaatgttttcagtttgtatattgcatattcacatgatcattgttcactattttatgaactggccttctcaatgtttgatgattttttaaaagctgttatgttgaattcagtaaaataacattaccttattttttttcttattcaaattctggaactatagcaaataattcgttaaattgtcatattcaaaacaaatgtggatacagtcttggttctccatctgtaattttttttaacagtttgctatagcttactgcttaactaattttaaataaggaaataagtatgttagatgcagtagacgatacaggttgcatgtggacactcagtcacattaacaacttgggaaaaaaatggcaatgttacggtgaattctcaggtgaacttttttcagttataaaacatctattttgaatctgtaaatattttaaatgttttattaaggcatgtaataaactattctttgaaacttgttgggtagaatgaaaattaaagccataatggtagaagatggcatactgattataaaagaagcagaaaaacattgatttttttatatctttcataatataattttctaacaatgcaataaaaccactaaacttttgtgtccatattttactgagaccatgtttcattaaaagcatagtttcatagtatttaatttacatttctccctaatgttcttacccaaatgtacctgaactaaaaaatgttagatgttggtgataagttgacagttaaataaaattctctaaaattgcttctaattgaatagaattgtacattccattttcattttctcacttcatgtggatttactcagtttagtcttttgatcggtaattagtatatctgaatttgtaggagagaatctttccttagttgatgataatcatgcctcaaaaaaaaaaaaattccagcattcaggtgttttaggaagcacagattttagctttgcttctgattttacttaatgttagtttggatagagaagtatagggactcttaaggggtattatctctatcagtcattaagttttaaaaacttatctgccgagtcagctctttgtatcctattcaatttccaaccaggcccttctgaccaagctttgggcagctgctcagcggtattggccatccagggcaaagtcttctggtctaatcatagtgattctcagctggggatgattttgcttgcctaggggacacttggcagttcccagagacacaaatctcgggggcagggtataggatatggcttctaggggcagaggccaggacagccctcacaacaattacccacccagggtatcgatctggctgacattgagaaaccctgactagaccaacgatggaatcaagatgacttgtaagaaagtgctcagttgtgtgagatagtgtggtggctgcaagagttcaaaggagacagggtgagaaacgtgggatttcaccaagctttgaaagattgtagtctgaatcgggagaagatggtctctggggagaggaggccacttggcacaaataagcctggcgtgttaaaggaacagaaggaggttgtcacagtgagagggagaaggaggaaggcccccacttgagtgttcaccagtgggtgtcccagcatcttgccctacccagattgacttaagttatcgaaggtctgaggttagactgtaagggctttaagagcaacagaagtataggtagtaggtattgagggtttagaggaaggccaaaaatagcaccctttccctggccagagttttgaaccatttgagaaataaaaagtaggtgaagtccatatcgctgatggaacccagcttggaaccatggctttctagctgtttagcccagtgaacctgctaaaagtgcattctggaattaggcagacttaatccatccaccggtcaccttggacgaccccaaaaggggcagagctcttagaggagcagaaaaatgtaaacagggagcaaattccacaagtaaggggtgggccgagccaagtagacttaatgacgctaaaaatttactcattagaatcagggactactacatcagggccaggacaaagtacaaagtggaagtacaaaggccagagggtgtttcttgccctggagatttaaactagggaagtcttagggaagagtgttcccctttcatgctccccagtttaagttctcttgaaacattggcccattgctcaaccagggctgtgactgatggcctggaggaggagagcatctgttccagagggcagacctcctctcacctttgaggccacttcccaacaccagcctttgcaggtgtgactggcttgggctgtcagtgaacatttggtctcagaaggctctggatccagcagtgtactagtaagtaaatgaattcaaaggctactctgtaccaaagactgaacatttttctcatccctaattctctcctacctcatcgtcccgtgtagcatgtagcatatcagatgttctgcattgagattagatcccaacataacattcccataagaaaatgcatgaaagtccaggaataaaatgctagcaacataatgatatccaaatttgaatggaagtttaacttttattattcaacttttagagaaaaaaattcaaagattaagtccctttggattaaaaaaaatctaaaggcattaaagtctaaaggaactaaagcaaatcaaattattttgtccacctgagttcgaagtacaaaactttaagaaaaataaatcccaagactatcctgccagatttctcattcagatcagccttggccagaggagtttttgatgcctaggtccagttgagattctttcaagaggctgtagctggagttgtctttaagagagtggttgttcctaccgtgctccagaaggaactaggtttgaggctgagtctctgatgtgctcactttagagtcagaagagttaaccacaaaattatcatagccttggccccacaaccacccttgtttcgaaacaagctaattcccaggtactaaagcagtcatcccatacaacactgctcccacagctcagtacctagtgctgccagagaccatagtagaacctcaatagtatctggaaaaaaaaaaaatcttggtttcagttccccaaagatgccccagtgttctgtaactcacaactcgtgatcctaatttctattggaaggacgctcaaaaagggcttaattttggccgtatacactgatcattcctgggggaaagaccaccattgcatgacaccttaatttacatttccccttccaacaagctgtttctggtacctggactgttgagtgagggctccctctaggggctctgagccaacatccctgtatacaggcgttttcaggcctgagccagaatgcatgtttaggcctaagaaagttgcctcctagggatggaggaggcgtcttaaatctatctttacggcccggcagggtggctcacgcctgtaatcccagcactttgggaggctgaggtgggcggatcacgaggtcaggagattgagaccatcctggctaacacgatgaaaccccatctctactaaaaatacaaaaaattagccgggcgtggtggcaggtgcctgtagtcccagctactcaggagactgaggcaggagaatggcgtgaacccaggaggcggagcttgcagtgagccgagatagcgccactgctatccagcctgggcgacagagtgagactccgtctcaaaaaaaaaaaaaaaatctatctttacatagatttaagcagtccagaatcaactacagatgaaccacatggatccaaggtcccttcatggttccctccttgtgcctgaatgcagaatggaatttggggtggctgatacagcaagggccacagtggcctggcgctaccagttagaagctagaaccttacaagcactctgtagtacgttggaacccagctgccttgaaaatcggtgaaaatcagtacctattatttttcccagctacacctaaaaggcctgtgaagtctgcttttcccctggaaactgcagcagtggcatcttgaggccacctgccctgccaagcacctgtgggcgctgggcctttccctgtgaaactgctatgttgctgttgatggagaggggcccaccggcggctgctgcccacatttaatttattccatgttgcacccactttctagggcctcttgcagtccgtgagaggtgtggagggaatttctgccagttgggtttaagatcatgggtagtacattccagaaagtgggtgttgactgacaggcatcagggggaagctaatgtaaggattttccccattgactttccttgcctcagttaccactgagtaccttccacagcctttgggtgcaccaggtaccgtgttctaagaatataatttttcttggacagctgctgtcttggctggggattggcttgatttcaaaacaggtggtgcaaatgctgtgataatcttgtgagtgtctcattaatgctgagccacttagactcttggcattgagccagttaaactcctgagtccctgaaggaattgcactatgagaggcgctccatatctcttctgaagtccttgcgcctttcacttaagatgcccctccccaccagcctctccaaaggcctaaggagaccagttagggctccacagaaagtcattctctgaggaaaaacaccacaagccacaacgatcctctagattcaatatgctcacagcctgctttaaaacctcttacccagaccaacgtcactcctgtaaaaacccacttggcctaatacaaacctccacatacaatcgaaggtaaaatgtcacggcctctactgcaccccgtggttcacaagactcccaatcacatgcgtctcttactacccaaactctgctcttctggttttgatttttcaatgtctgtatacaatgccgccctgccaaatgttgggtttccaaaggaacattgcatattcctttcctgagctatgaagaatttgagagagaaaataaaggaatggtagatgggaaaccaaaacaaaacctcagttgctgataatggagtagcttagcgtgagagcctagtgcaaactccagaatgagtcaagttgaccttatcaggttgtttcttgttagagggaagtaacttttccacccttggtttccatgaagggagattttcctctgggcagcatagcaccacctatactccgctaatcagcatggtggtgtggaggcgtagagtgctagtggtgctatttggagacgggcacatcccaagaggaagaatggccatgcagggcagaggacaaccagttattttcagatttatcaatcagccagcgcactccatctctgcagggatgaggggagcaaagaggttgagggaagatcatgttccaaggtcagagtgtagaaggtgaagggaagaatgtggaaaggaattacgtggaggcagagtctgggggctttgagaagcttgcaagaagagaaagagaaagataccccagaagaggagcagactcccatgaaagccacgaacttgccctctcatctgcacactccactactagcgggaacataggttcaggtttaaaagccaagcctgaccttgtgtttaactgcaaacacttctttttcctcttcctcatcttattcttaaagtataaatgcaaagatcatggaaaatatttaaaaattgagcacattaccttttcattttaaaacagccatcctttaaaacagacaccattttcattctgcactcttagtttatacttaatcactgtcccgaaagtcagctgttttctaaacagttaatttccttctttcaggagaccggacctaaataattttccagataccatcttgatatgcaggtttcccatgtgatgtgaatctcttggcaggagatcctgttaacaatacccagcacgctatatgaaaatatccactataacttaagctttctaaagtaatacctatttggtccacctcagaaactgacagtagttctgttttgagctattaatttcagagaatcttcctttgtgaaataagcatgcttatgttttccttgctttgatttaaatgatagccttaactgctgggcacaggactactattaaaaccttaagaataagattttctgaagaaggaactcgttttttaagcactgtgttttcatctcatttgagcgtttactctgggctttagaagacctcatctattatgctcaacatctgatatttgaggggttctgtttcagggttctgtggaaaatctgatgtgccaagaagtgttccataccattctgagaactctggatacctgctcagacagctctgtttcagctaaacagtaacatctgggagggaagcttaatgtggaatcaaggatgaagtttaacacaggaatgagaagtagagcacatagctgctaagataaggtaggagaatttggctagtaaaagcacttaatggcctgaacttgtgtttactagggcctgggagagcagacagctgccagcatacttaaaataggttgagtatgaagtatgcacttaaggactaaaagaattgcagaaatttaagcaatgactcagttacaaatccaagccccttcagaaagtacaggaactatggggaggaatagaaagaacataaacctgcagtgagacagacctagttttctttttttttttttttgagatggagtctcacttttttgcccaggctggagtgcagtggcgcgatcagagctcacagcaacctctgcctcctgggttcaagccattcttctgcctcagcctcccaagtagctaggattataggtgtgcaccaccacacctggctaatttttctatttttggtagagacggggtttcacgtgttggccaggctggtcttgaactcctgacctcaagtgatccgcccgcctcggcctcccaaagtgctgggattgcaggcgtgagccactgctcccggcctagacctagttttgaagcctggttttgatgcttagccacagtatagccaaaggaaaattacttaatgtctctcagatagaatttccttatatgtatgtctttcatgttgggacttctggtcctcgatagcaaagtaagactgactcaaacttctactcacacctcgtgaaaattcaaatcaattcaccgcattgaatgccttctttaatttgctctgttgcccaggctggagtctcagctcattgcaacctttgcctgccaggttcaagtgattctcctgcctcagcttcccaagtaactgggactacaggtgcgtgccaccacacttggctaatatttgtttttgttgttgttgttgtttttgttttttttttttgagatggagtcttgctctgttgcccaggctagaatgcagtggcatgatctcagctcactgcaacctccaccttccaggttcaagcaattctcctgtctcagcctcccaagtagctgggactacaggtgctcgccaccacacctggctaatttttgtattttttagtagagatggggtttcaccgtgttggccaggccagtcttgaactcctgacctcaggtgatccacccacctcagcctcccaaagtgctgagattacaggcatgagccactgtgtccagcctaatttttgtatttttagtagagatggggtttcactatgtttgccaggctggtcttgaactcctgacctcatgatctgcctgccttggcctcccaaagtgttggaattacaggcaagagccaccgtgcctggccggttacagttttctaagaaatggcaatggaaggcctcactgagaagatgtaagaactgaaggaggtgaagtgagttttagtggttacacattgcaaattatttttggctaagttgtaagtaaaaaatagaggaaataaccaatcttgtatggttgtagtaagaatcaaatgaaacaatgtatggaagagtgtctaccagaaggccccatgacacagctagcacgcaataagctttcatcgtcttgtatagaatggtaccatccaattcagtacccactagccacatgccacgtgtcacaacccccttcttttcttagtacctttttgtcagaggtcccctctctgttcctccaacttgccaaaattcacctccatctcctttgcagcatttgagaaggaactggccaagaagtgtttttggaattcttagctgaccacccacctccagcctacagaggtggttgaaaagactaagaagagttttttggagaagatagagaattttgttagaaaatgtggtagtgctgggactgtaaccttcttaatcttagtgaggggggctatgagatgcccactaaaaaagccttgacatgagtcacctagagtttgggagacacaaaggactggcaccttatgcataaaaaatattgcttgagtagatggatgaaactcctgtggcagcagaatagagtggcatttgggaagaagaagaattggcactggtgggggtaaaagttataggacttcagccaccagatgtggaacctaaatgaggactgttcgtctgaggtcatttccaaggggatcctattcaacagggcttctgccagggagggaggttgcctttgaaagagaaaatctgagatttaccctcaggtacagaagctgagggattgctcatggtcaaccaatggagctctaaaagatgagcgggaagctgggtgaagaggaagcatgttttgagccaaggcaattgcatatgcaaaggctgagggatgagagagggcctctcatggtttatttgtagagctgaaagatgtttggtgtggttgcatgccatgtatgtgtggccggggataatgagggctccaggttggaggagtgacatgtggtgagtcaggagaggggtgagaagagtccagaccttctcaggtatatgataaagtttgacatttatcttaaggacaatgggaaacttttgaaaggtgtgatatgatcagtcctgtgtttcacagtttgttttggctgcagtgaggagagtggattgtggagtgggaagagtggaatgggagataccagtaagaaaccacggctgtagtcagacaagaagttaggtggactggaccagggatgtgttcgtgggaaatcagaacagtggccagattcatgaaacatggcagagatgactgtcctgaggtagaagaagagctggtaaaaaagatagaaccacagacgatccccaggttcctttcttgaacaacagagtggaagatgtttctgttcaatgcgatggtgaacacgaggtcagagcaggtttgtggaaccaggtgttaaattcagtgatgagtgtactgcaggcaaggcatgctgtgtggcgcccatgtggttgttgacatgtaagacttctgctcaggaggaagatttgggccaaagctttacatttatgcctttggcatatggtccacttttgaagctatgtgagaggaaaagcttgcctgaaaagtgtgtgtgtggtgaacagaggagatagcccaggacagaccccaaaggaatactgatgactgggaaagaagaactcataatggagataaggaacactagaggagaaggaagatcagaagcaagcaagatcttgcagcagcaagatttattgtgaagagtgaaagaaaaagcttccacagcatggaaggggaccggagcgggttgcccctgctgactggggtggccagcttttattcccttatttggctctgccacatcctgctgattggtccattttacagagcactgattggtccattttgcagagtgctgattggtctgtttttacagagtgctgattggtgcgtttacaaacctttagctagacacagagtgctgattggtccgtttttacagagggctgtttggtgcgtttacaaacccttagctagacacagagcgctgattggtgcgtttttacagagtgctgattggtgcgtttacaaacctttagctagacacagagtgctgattggtgtgtttacaatcctttagctagacagaaaagttctccaagtccccacctaacccagaaggccagctggcttcacctctcaatcccccctctaaacaggacaccccaactgctgctgggaattgggcgatgactgctctagctacttcctgctggatagaggcaaagaagggtccctgcagttgcagtgtcttccagaggggaactctctaggccagtgaaagggccagcgggtcggtccaggggtcctcggtagaagttgttagtttagctcatttggggttccattcgtaagaccatctgtagcttgatggcctcgattctagaggaaacagatttgacaaggaggttaaaaataagggtccgaaggcgagtaatagcaagatggctgccacaggacctagaaaggggagaagccatgttgcccaactccagaggttggtataagagttttgaaaggcgttgtctgatttcagaagccttttcctgtaagcgccaggtggcatctcttactatccctgactgattagtgtaaaaacaacactcttcccctaagaagatgcagagtcctcctttctcagcagtgaggaggtctaggcctcagcagttttggagagtcactgctgccaaagagtctatttgggattgtagagtaaggatagatttcgttatttcttgcaaactatctgagaaatcctgtgagagtgtgtggtagtaggataatgaagtggatatactggctattccggttcctgtagcagtagccattcctaaccctattaagtagggtattagttgtatggctctgcactgacggacttgagctttgaggggaacagatagggtctgatttccataaaattagaagttagtacaatacatgttacactgttaacttttagcaaacttttgttgaaaaccttgtaagtttggggttttaatttttctttgctattaataaaacctcattcagtccatattaacttagaattggtatagatggctccttcctgatactgtaagtactttaaggtttggctgagtgcaaacagctgcatgtttgaacagaccaattattaggcaattttcttaactgcttctacaagagtttccttatcacttactgaatacccattgtgtcttttttccttagtagttgaggaggaaccgtatattatcctgtcctgaagggagttcctcctagatctggtcagacctttgtatggtaattaattaagatttagatcccctgttaggaaacctgctgggttaaggatttttgataggaaggctatgggttgtcagtggcttcagtgctttcgggctacgcccttgtttacactgacaacaaggtgatattggagtgttacagggttacagagaagaccttcaattatcaattataggttttaaatttaccctggcttttaatggaatagggtacactgtttttcctttactacttctatctctctctttctctctctttgacttcttctttgtctctttctttctctcttcctttctgttgcctctgccagctgcttatgttgctgttttcccctctccttccccttttgatggctttggcagtgtaagactgccacctccttgggtttttacactgcatgcaataactccatggtttctttgtgatatttaatgggcgttcccccagaggttagtaactccctttctttccatattgcagcatgggcatgtaggattagataagcatacttgctatctgtatacacatttattcttcttccctttcccagttctaaggctcgggtcagtgccactagttctgctaacggggcgctggtccctgggggaagaggcttactttcaagtactgttactgtggcataacctgcccttcgtatcccattctccacaagtgaacttccgtcggtatataggttaaggtgaggattagctacggggacttctaagagatcatgtcaggcggcctaagtctggactacaatttgttggcagtcacgctcgattggttccccatcctctgggagaaaagtggcagggttgagggccacgcatgtacatatttgaagcaccagtccctcaatgagtagcgcctggtatctgagtaggtggttgtctgatagccataaacttcctttggcacctagtatgccatttacatcatgagtagtccagacagtgagatcctttccttgtattattttgatagcctctgacactaagatggccaccgccacaactacccttaaagagtgaggccagcctttcgctactacatcaatttccttacttaggtatgccactggttgtggggttgccccatgagtctgagtaaggactccaagagccatccttgctctctctgtgatgcataaagaaaagtttcatcctgtgggaaggcttaaggctggagcttgagtttgttccttccaatgcccagacttcagggttgattccctcctcaagtaggggacaacaaatgggtaactcgttccccatattcatgtagataataactccagctttggctactcctactggatctagtggagtcagcgtgatccgcttctcccactcacctagtccccacacgccctgagagctagtccctgtggtctgatgtccacccctcacttcttctgccctttccttatacttccctgctggagtgactggaagtggggatgctcttccctggacacaggggagaaggagggcccctggggttgtcacttcctctgcccttttgggtggggcaggaagggcacatttgatgttagcaattcagcgtaaaagtgaaaactaatttggcctcaagatttaagagtcatccaaacaacagttacagggctaatatctttaatctttacacatttgacaatatccaataaaaagaacaccaaactacatcaagacaaaggagcaacagacatgggcctgcagaggacaaaagagaaaacaggagcactcaataaccaggaactcagggactttggaggcaacctgtgtgggttaaacatgcttttgaagatttttatcattatttctcattagaaatataaaaagtgggctgggcgccgtggctcacgcctgtaatcccagcactttgggaggccgaggcaagtggatcacgagatcaggagttcaagaccagcctggccaacatggtgaaaccccatctctactaaaaatccaaaaattagttgggtgtggtggagggcgcctgtaatcccagctactggggaggctgaggcaggaggattgcttgacctcaggaggcagaggttgcagtaagctgagatcacaccactgcattccagcctgggtgacagagtgagactctgtctcagaaaaaaagaaaagaaaagaaaagaaaagaaaagaaagaaagaaagaaagaaagaaagaaagaaagaaagaaagaagaaagaaagaaatgtaaaaagtgctaaatagaaagaagtaaaaaatatatcaaattagaaaataaaaaatgagggggagtgaaactggcattctaacacaaggggggtagtatttaaaatagcttttatgctttggggaagcagtttgatattttatttaaaacattttaaactagccataacatcagacacagtaattgtatgccaaggaatccatcctgaagaacaataatcttaaattttaggactattattaatccataataataataataaaaatttcttcttatatcaagatgtccatcatagcatttatcatagtaaataattttgaatagacctttagaaatggaaaaaagcaaagcactatattgtatctctactcaaactaagatttgacactgtactcggctctttttataatttttcccttaatcctcacagtaaaatcaaatgtttgacacaatgattgtctctttatgagtttttagctaacaaaatgtttatggtaaacatggaataaaatgaaaaatactcatgacagatgctaaacatgaaagcaagtgatttatgtatctagtatgattataaccaggtatatcgaaatctctctgtgaataaaaaaaattgaagtccatctggggtgaacagttgttatttattaaaatttgcttttgcgagtactcatgaatcttgagacaataaccaccaccacgattataaaactatcaaacacgattttaagcaaagaaagaaatggggaaaaccgtgaaaggaaaataaatctcaagactccagaatcactaagccaaagggaaaagtcaagctgggaactgcatcagacaaacctgcctcccattttattcctaaataaaataactacaaagaaaaacaataaaaataaaaaagctacatacctccctcacaatttgcccgtaaggaaattccttgtgagcctcaaagatctttaccctaaaacagttctgttgaacttcatcctggccatattaattgataccttatcttcacaggcccaggacagaggacagacagaactcttgatcattgctctgctcacctgtgacaaatgcatttctcattgcttcctctgacctattgtttatgtaaaaatgcagattcactgagtcagactaaggcatcagtgactattcctctattcattccacctcacatgtattcagtgaaaggctgatcgaagaccccaaagaatgaaaccttttgtcccttatctacctctgacctggaatcccttacttcgagttgttccacctttctggaccaaaccaatgtacctcttatgcatattgattgaggtctcatcaatgtataaaatcaagctaaaatgtataaaaccaagctgtgccctgaccacttgggtacatgtcatcatgtacccaagacttcctgacgctgtcataggcacgtccttagccttggcagataaactttctaaattaattgagacctgtctcaaatactttgggctcacaaaacgtagctgtccatcaggcagatatctaaaagcaagaagtgatattttactcagctaaaagctgctattttgtcggcggcctcagaggccttccacaatgaactccctccccaaccctctggcctcattcccaggcccctgtcctctcctgggaactcctgggaatgtcatgtttgccccattgtcatcttgtcagtgaggctcccctgactgccctcattaagactgcatctggccaggcgcagtggctcacgcctgtaatcccagcactttgggaggccgaggtgggtggatcacctgagctcaggagttcaagaccagtctggccaacatggcgaaaccctgtctctactaaaaatacaaaaattacccaggtgtggtggcacacacctgtaatcccagctactcaggaggctgagacaggagaatagcttgaacccacgaggtggaggttgcagtgagctgagatggcaccactgcactccagactggggcaacagagcaagaccctgtctcaaaaaaaaaaaaaaaacaaaaaaaaaccccacatgcttcctccttcctaccattctacctccaatccccatccccatatcctgccctcttgttttctctctttgtaatgcctgccacctcccaacatagtatagaatgagcttgtttacttagtctagtgtttaatgtctgtctcactccactagaatgtaatcatcgcaaggccaggagatgcgtttggtctgtgctgcatctcaagcaggacaatggctggaacatagtagggtctccaaaaatgtttgttgaacgttgctgatggcggcatcctggagtaggaaaaagactgaagagtggaaaaagaaatcctgacatgaattctgggcaaaggcaagcagtagctgacttggaaaatgattacagtaggttttgtgccatttgagttatcagtattgcagatgtttttgcacctgctccaccaacaataattgggttaaggcttgcagctgggatattatacagcttgctttatctaggttttgttttgcttgcaaatcaatcaatacttacaatgattttaacaaggggaaagagccgtagttgtagaccttggagtgtatttttttttgtctagctttaaaaaaaattgttaatgttttgatactgtaactctttttagtagttgtggctttgcagaccttgctgcactttgatctttttctcgttccagctatagatggcagcacaccactacctacgatccgatcaccagcctgggtttgtaagtcagagctgttggtcaggagatggcagctaatgagtaatcagtccaaactgaatggcaaattaatgtcttcattaagtgaacaaaccagcttcctccataaacaaggtcagagtatttataacccagtgtatttcataaaagcaaaaacgcatctccatttacataactttactatggagctcatgatttatctgcacaaagcatatgcaaaatctcacttgtataccgtctttaataaggacccatgccattctgatgtaattattaataaagtcacacttgataagcagccttgtttttcttacacaaggtaaatgaaaaggtgattgctttaaacaaaagccactcttataagatgatattgggtggcctgttccaaattgagttcttagtaataaaaatgaagtgtgatccttattgatcaaatatatctgccacttaggttctatgagaacttacttaaaatttagagttggttacacaggtataaagtttgatatttaccatatgctacatgtcacttcaattcagtgaattgaatgcttaattttgccatccttgtcagagaacaatgtagaaatttcagaaacttttcacaaaatgaccaggtgtcaaagactctgaatttctgtttctagatcagtgtcatccagtagaaatataaaatgagccaaatgcaagttgcatgtgaagttttaaattttctagaaaccacatgttaaaaagtaaaaaaagaggtgaaattaatttgaatactgtactatattttatttaaccagatatatccaaaatattatttttatcaggtaatctatataaaaattattgcaatattgcacattcattttttttaatctggtgtgtattttacactcacagctcatttcgatttagattagccagattttaagtgctcagtagccacatgtggctagttggccacatcatgttccgctcggctctaaagacttagtgcctgttatgaggggaattgtgtgccccccaaattcatgtgttagaatcctaacccccactacttcagaatgtgaccttatttggagatagggttgttaccaagtaaaaacgaggtcattttagggtggacctttagagtggatcctaatccagtatgactgatgtccttctaaaatgcggagactggagacaggctcacacacagggagaactccatgtggagaggaaggcagagactgggtgatgcatctccaagccaaggaccatcaaagatcaccttcatccccagaagctaggagggagccatggaacagtctccctcacagcctcagaaggaaccaaccctgctgatgtcttgattttggacatccagcctccagaactgtgagagaatacatttctgtcgtttaaggcacacggcctgtggtgcattgttatggcagccctagtcaaccactacagaacctttggttggtggctgccattgttccaaagctttcctctccttgccttgaatctcctcttctcttccttctgtgctttctcttctggcctctctgtcactcaactttcctgccctctctcatcgttttccataggatctccctctcatagcacagaagtaagcagggagtttctgttgtagtaagcgggagatgggttccacctgagcagggagatgcctgacttgcttcacgtctccaatggggataatattatctgccagctgtcccctggagctactgttgtgtaggtgaagggccgactcagaaaatgctttgaaacccataaataatgacatggatgagaatgagtattttgtgtgttttactttcacatgttaggactcaaaggtggaatgaagtgttttctaagttactttggtttcttctctctgtaattatctagggttcctacttcatggtagggaatgtgtgaaagggcataggccctgccactttcttgccatctgtcagtagtgggcttctacgggctgcctcccaagcatgttttatatcctctctacccagcgcagaacggcctccctaactcaaaaaccacgtgttaaggtgatatggatcccactcccatctctagaagtgggtcccaaatagggtcactgcatcagataattccaaggggtatcatcttgatattgtttggctttgtgtccccacccaaatctcatcttgaattgtaatcccataatccccacgtgtcatgggagggagccggtgggagataattgaatcaggctggctgtttccctcacactgttctcgtgatagtgagtgagttctcaggagatctgattgttttataagcgtctggcatttcccctgctgcactcattctctctcctgctgccctgagaagaggtgccttccaccatgattgtaagtttcccgaggcctccctagccatgcagaactgtaagtcaattaaatctctttgctttataaattacccaatctcgagtatttcttcatagcagcatgagaacggaccactacacatctgcattgtcataaatgtgtatagtgaacttgaagttgtgcagtgcacaacctgcacagtcatatctgatagccccagtcctgtacaattaaatcattcaggcaatcccgtctctctgaccgtagtcataggtacagaatgggtactaaaatcccgtaaagctgtgaggagagattgtccggggttactgagaaaaaaaccaaaaaacaaaaaactcttgccttctccagggacctactgatagacggcattctgagtgtgatataaacatataaggctggcagctgtgctcatgagagaagggccagtaccttttgcgaagtcactaggtggaccttgaggaataagagagcagagatctgagagagccagggcttgtgcttatgcctctggatcaagctttgcctgaagcacctgtgcagtttgttacatgagcccatgtatttgctttatagaattggtttgggttggattttctttcccttgctacccaaagaattctaaatgctacactggagatggaagtaaagaaagggggagatagagatatgtttctggttgacagtgcaacaactatcaaaaacaaaaacaaagcttcttcaagcatccacaaccattgccacagcaatttgaattacattttctaatgaaaaccaggccaaatgatcgttaacattctcagctaactcacagcaatgttcttaagtccatttgtgattgtccaatgctaaaaatgtataccagttggcattaaaaacctaaactatttctaccactgtatggcttttaactagaggtttgtggtctaccctgaaaacttaatctactatgcatatctttatttctaaactaatacgttcttttgagttcagcctacctaaaagcatacttctggtgtactgcctatttgtaaattgaaacttgtcataagtataataacattgcccccattgttcgtattaattcatagcaagggggaacactactgtatagatgttataaatgcttaggcaagggagaccattcagctcttaacccaatttcctgctgcaaatatcaaaagttggatcaacatatgcccctagttacaaagatgtaacattatttctaaagtcttcagcagcagaatcctaaagggcccctaaatttcagtcttaactttgttccagccacatcccagctgtttctcccaagtacttcatcacctgcaggctgttttcagttcattatgggaccaaggagaggccactgggacagtatatcaatagaacaatccttgccaaataatgatatttggaaataggctgggcacggtggctcatacctataatccaagaactttaggaggctgaggcaggagaattgcttgagcctaggagttgaaggcggcagtgagctatgattgcaccactgcactccagcttgggtgacagagcgagaccctgtctcttaaaaaaaaaacagtttttggctactttgtaactgaaatagatcaatccctacaatgtccttcccagggaggccaggctcctagcctagcctctttctgcctgcctctctttggtgcgtgggtttttctgttgtgccccttcccaaggcaggagctggcatctctttccctcctgcaaactcagtcccatggatcctcttcttgttgttttctgcactgattttgtatcgattcctctggagcaaacattggaagctgctgtcggatatgccagggctctctgccctgttgtgttctgtgttgctagctgaagattactcccggctttgtttcaagacccttggaaccagaatagaggtgacgctgtcctgtttgtactctctctggctgtgatttttaaatccttgttctgagcctgctgtgtttttttttgttttgttttgttttttctcctctgcctcacttttctagctcattgccttctatatcttccgctggctcagtttgcctgagccctctgcatttggcactaaatcgtagtttattctaatcctttgcctggaagctgatgctggtaaccagatggcaataaaaagacactgaatgcaacatttctacctgtgagttgagagacaatactcgttacttcctgggaaaacagttggtgtttttctcagttggggtaaaatgatatttctaaaaatcctattgttttcttacttggataaatgttaaaatatgtttattagaaagtatgcttttaaattttttttagtctaaagaaatattgctgcttctcagagttttggcaaatattgcttttcatttgttcttcttttcctgtgtcttctttcttttcactctcttaccacctatagatttaaattccatgtcattttattattatttactgtattaactaaactcactttttatttagttcaaaaagatggatgtgtggagtattttaaatttggctcttaaaaccacagtgtattacagattagaaagctattattttttctgacatccagcaggcatcatttctgttttttagctatctgacagcttggggacagatacgggcctttgttacgaactgggccagagtattctttctcgagacttttcaaactagagctagaagagaggtgccccctgtattagtcagctactgctgcataacaaagaaccataaaatcagagtcacttaaaacagtgagcacttatttacttcacatctcttcaggtctgatgagtgggctccactgatctcagcaggcctgctcatgtgtctttaggctggcagtgggtggtttgatttaaggatgtctctagtccacactgcatgtttgcacatctgttgcctatgtctttgctatggtttggatatttgagccctccaagtatcatgttgagatttgatcttcaatgttggaggcagggcctggtgggaggtgtttgggtcctgagggaggatccctcataaatggcttggtgccattcttgtggggatgagtgagttctcatgagagctgggttttgaaaagagcctggcacctcctcctctttctgtctcttgcttcctctttcaccacgtggctcccctttaccttccaccatgagtggaagcagcctgaagccctcaccaaaatcagatagataccagtgccgtgcctgtacaacttgcagaactgtgacccaaataaattttttttctgtataaactgcccagctgcaggcatttttttttttttgtagcaacgtcaaaacagtttaagtcagtctttaaccttttagcagactagttggggaatattccacaagagagcaagtgagaacctgcaaggtcacatagacctaggctgtgaagggtcatgttatgacttatactcttatgccattagccaaagtaagtcaaacaaacaagcacaaactcaaggcacaggcatacaccacccgctaggaggccatgccaagggtgtggatacatggaagggtgaagaactggactagtctttcaataccacagcccctttcttctctaggcgtggagctgctaggagtgagccccacatcagacatctgtctctggtaggagaagacagtcaagatccagagagatgcaatggaagacaggatgggagaaggtcccaatcattttctagttattaataacagttttggctgtgcttagattgctgcacttgggaggtttggttaatcaactttttgttttgttttgttttgttttgtttttgttttactaggaggtaggctactccacaatccctccaaactcttctttcttgcattaattagtataaactgcatttctggtacttgcaaccaaagggttatgacccatctatactgttttttctagatcagatggtttttatatcaaaagttgctgtccctatcccaatgcaaagcttttttaggttgatttttagggggataaaatctttcatattgaaaataaacattatcacctatatatcacaggttattagtttattaagttaaactgaaccacataagtttcaaataaaagtgttactgaatttgcagtaaaaattacacataattagtgtaaattaggaaagatataaaacagttggcacaaagcaatagcatccatacttttagcccattaattttatccctaggaatttacctcaataaaataatataacaaaagcaaatgctcatatacattacacaatttatgacaactgtgataataataaattaaagggacatgtctaaattaagagaatgtgttaacaaattatgttagtttatcaggatggaatattatgtagtctttatgttaattaagaacattctataaaatttcaaaatccatttatgacgtagtacgtgaaaaagcaaaacaaaatgcaaaattacagggacatccagactaggtatataattttctttttgtacgcagcacaaccattttctttttgtgtgcagtagaaaaaaacatttcaaatctacctgtaattttctcttgttccgctaggagacatgcatcatctttgattaaaattattcttcactgggacctttatttatgcaaaggcaaaattctattctagactcaagaagctcgagccagacatcctaaacatttctgaatagaattatcaaaggctgaatttgtcatgtgcagaattgcatctttttagggttatgatgctgttgcctgtgggtgaggatgtggtggataacgcccttcttgcagtgaggataaggggggttggagaaggtacccaggggactggtggctcatggtaattgatggactaggggaggccacgtagagaggacgccggtggagaggcatggctgatggacagaactccaggagcagtgatagttcatatccagtacagtatttttctttttctccattataattctcctcattattctcaagccaacaggaaattgtcttaaatgtttatccagatatttgctgtacttttggaaattaagggaggagcctgtaactctccttgcataaaacaagagcctgacttgtgtgaaaaagtgataagaagatattcagtagagatctgcggggaagtctcagagcagaggtccagaataagttaagtgtggactgcataagaattccatcggtatggtagactgtatttctgtttgccaaatattttacttttcctccgtcttttgccatggaaggagtttactcttcaactctgccagactcaagagaggccattcgctttgctgtggccgatgaaatgggagcagcaaaaacatttatcatttctgggaaccagtgtactgttctccatgtctcccttctctcaccctggacctgataatattccagctggttgctgctccatcatcctggaacctacaagtttggggagggcgtcaaagccagaggcaactttcattcaacatgttatgtgagtgtgatggttaattttatgtgtcaacttgactggatcatggagtggccagatatttcactaagcttttctgggtttgtgtgatgatgtttccagatgagatttgcatttgagtcagtggactccataagatagattgcccttccctgaatggaagtgtattagccaatttgctgagagcctgaacagaacaaaagatggagaaaggagaattcacctcctctgcctgactgattgagctgggatatcagtctccttctgccctcaaactgagacttaaaccatcagctccactggttctcaggccttgggtccgaaaccaaactacactaccagctttcctgggtctgcagcttgcagatggcagagcatgggacttcttagccttcataatcaagcgagctaattcctcataattagtccatctgtgttagtccattctcacactgctatggagaaatacccgagactaggtaatttataaagaaaagcggtttaattgactcacagttgtgtattgctggggaggccacaggtaacttacaatcatggcgcaaggtaaaggagaagcaggcaccttcttcacaagggtggcaggatagagtgcaagctggggaaatgccagatgcttataaaaccatgagatatcgtgagaactcactatcacaagaacagcttgggggaactgcacccatgatccaattacctccacctggtcctgaccttgacacatggggattatggggattacagttcctggtgggatttgggtggggacacagagccaaaccatatcactatctctccccctcatcccctctctctctattaaatcccttattggttctgtttctctggaaaaccctgaatacagtgggaaagaggtaaacctttgtggttgtaagctactgagactttggggttatttgttactgtagcatgatctggcctattctaatttatacagtgggatttttttttcccccacaaacactaaggaagtagcatgtggaaggccagaccttctgttgccatcagtaggggggtttctgtagtctgaggacctatgagccttttgggttacctttgacttgcacttgggcttttatgttgatgccaagcagtatgtttatacttctctaaaatgtatttttctctatataaatagtgtttttgttaactctcaccggctccagtctcaacttttgcctctaatttttcccataatattcactaactctagtgatagctgtctatgcgcattgtactgagactaattcagagagtgggttggatgaactttggtttgatttgtacgtaattgttaaaaactgtgtttaagaaaacagttgtacccttggcaaaacctggaagtctctatgttaacaattttcccaatttttgttttaggaagccattctgcatattatgtttttaaataaaaggatttgactttgggctgacaatttagcatttaaccactgtctccgcaccagttccacaagagcagggatttagattaattggaaaaacctcattggtttctgatggagggggcattcatagaaacaacctactgacaactaaggagctactgcgatgggatgggcagcctgcagcttcactcggtgggcagcctccacaggtactttaattcctcgctcttctggccaggcatctcttggtaaaggcaggtagaggaagcaaagcaattacctagataattaaggaaaaacaaacctgtatgtggcaggtaacttggggagctgcttctgattttctaggcaactattttcattcttcacttctctggtgtcagcaggaatctgagctagatcccaagagcaactcgaacaattacaatgctctcagttggcaaacccggcttcatagcaacttccctcctcattgatctagagtttgaaatagctttgtcagatctcgggtgtgttcctgctgatttatggcaaaatcccagtaacagctgtgaaaatgtttgtccatttgtgaaacttcagaaagcgggtctagcaaatcattctcacctggtgattctggggcaaggtgagaactgtaccctcacaggccgggtgaataagattctagttgcggtggaggccaaggaagaagatgtactatgagtcaatctctctatgaggcatttgctgaaccttcccctcctacaccttcctacaaggcaggtccgatgacttttactttacagatgagaagatggagcctccacaaggcacatagctggtgagtgacaaaaccagaattcaaacccagatccatttgatagtgacatttgtttccactaccctagtggctctgggggaagccaggacacccatatttttgtaaagtcccgtagttgtttctagtgtcatccgggttggaaactgtatattaagtcagtggttctcaaactttagcatgcattagtatcccctgttaggcttgtaaaaacacagattgcaggccccacacttagatttctgacttggtaggtaggtctgagttgggaaccaggaacttgcctttctaacaagttcccaagtgatgttgatgcgggggcctgggcactacactatgggaaccaccaccgcattaaggtgaactcagagctgaatctgacatgaaaatctgcattaatggagatgacatcagatatctgcaaagtcacttaatagagaacggttgagactaagtcttgactaatattaaaactaacacatctaaaaagactatgtccatcacaggtgggtggtcagaatagaaacattacataatgggaaagaaaatgtagctgatgctattcatctagaaggaagaagtgatgtaagggtcagtttccacctttgctttgaattccttggacagcaagcaaccatatgagcattaatttgatttatgtttttcaggtatcgtatctgatttcagatacatatgatggtctcaagtgtgttttttaccaccaccactttgtaggcctgttgatgccactgctgttgaagtctatgtgaatggtgccccctggtggaaggaaaaaggtagtttattacagtccgttgtaaatgagtgacctagcgttgttatcatgctctgctcctagagaccactccactcaccttaaactagcgagcctgaggaccggtcccggggacccatgagaacatgatctccgagagccctgcccttgagaaaggttctcctcagcaatactccaactcaccccagacctaaaatttttttttttttttttggagacagagtcttgctctgtcgccaggctggagtgcagtggcatgatcttggctcactgcaacctttgcctcctgggttcaagcaattcccttgtctcagcctcccgagtagctgggactacaagcgcacaccacctcgcctggctcattttttgtattttagtagagacgggggtttcaccatgttggccaggatggtttcgatctcctgaccttgtgatctgccagccttagcctcccaaagtgctgggattacaggcgtgagccaccatgcacggccctaaaattcttaaaacgtgaaaatgggggaagatggttaacacatccatatgctatcatgatatatatctttcttcttagttgtatgggatgaaatgatgccaagattttccttacagagtagggattgtgactgaagcctttggacaggtatttaggcccttatgagtgtcccctcttgtctagagaatgggacgccaggaatgtcagatgcttttcagcctctcccctgctctcacgcctagaaacaagagctccacaaaggtctctcattcctcaaggctgatgaaaagcccagcagctaaatggccagaagcctgtctttgtgagaaagcaagaagtctctcggtttgaactcttcggtctagagacagattcttctaccagtggtgtaaaaccctaaagaggctctgcataagacctaccactgctctgtgtctcatgacaccctgcccccaccactggaaggccacacttattctttgtgttcatgcttctctatgatctgcaagtttcccaagaacacctggattcgaagctcaagtccaccgctaaatagctatgtgacctaatgtgtcagatggttataaggattacagagaaagaggtatagatagagctggtagcagtgacagacacatctttacatcatataattctgacatgcattattattgtagttttctgttattcagacatacttgttaagaaggtgctggggacaatttgtacatgctgggtatgaaagggcttggaaagtatttcatgaatggagttggcattgaggagtccaatccatgtacaatgggtagaattagaaaggcattgaggatagtgtattagtctgttttcaaactgctgataaaaacatacctgagagtgggtaatttataaagaaagaagaggtttaatggactcacagttccatgaggctggggaggcttcacaatcatggcagaaggtgaaaggcacatcttacatggcagcaggcaagagagaatgagagccaaggaaagggggaaaccccttacgaaactgtcagatcttgtgagacttattcactaccttgagaacagtatgggggaaaccgattcaattttctttcaccgggtccctcccacaacacatgggaattatgggagctacaattcaagatgagatttgggtggggacacagccaaaccatatcaggtggttacataagagatccagtagagaggtgggaactccagaggagataactcacctggaaagtaggcaatcaggaatataggatcccagtatgatgaaaaaaaaggggctgtgggtatgggaggcatatctcagagagaagaaacactgctgttcatgcctgtgaaacccaaggtttccccttcctcttaagggttctctccctctaatgagagttgtttacactgctgattagagactattaaggtctagaaatcaatttgtgtggggttgtggccagcatttaaaaaacagaacagaatatgaaatatcaatgtgcattgcacatagtgagtaaatattactttatgaaactttaatcaattacacatgtacatgtttataggggtatgatgtaaagtgtatcattcctatgggtcttggtacaaggagttgagagctgcgtctctagtgaatctactggggtggggagttttctcatgtctgctcttacaaggtcctcttgactatttactttccaggatggtttttccccatcagccttttctgagggtctgagtcagtttgggctgctataacaaagtaccatagattgtgtggcttagaaattacagaaatttatttctcatagttccaagattaggatgtgagcatggtcggatgctgatgaggaccctcttccgggtcacagcctgccgtcttcttgtatcctcagaaagagagaagagccgggcacggtggctcacacccgtaatcccagcactttgggaggctgaggcgggtggatcacttgaggtcaggagttcaagaccagtctagccaacttggttaaaccccgtctctactaaaaaatacaaaaaatttgctgggcctggtggtgtatgcctgtaatcccaattacttgggaggctgaggcaggagaattgtttgaacccgggaggtggaggttgtggtgagccaagatcatgccactgtactccagcctgggcaacagagtgagacttcatctcaacaaaagagagaaagaaaggaaggaaggatggaaggaaggaaggaaggagagaactctttggggactcctttataaggtcactaattacaacataagggatccaccttcatgacccaatcacctatcaaggctcctcctccaaataccattgcattggaggttagaatttcaacatatgatttctggagggacataaacatttagtccataacactgagttaaagcaggtacctattcactctccttctagtcggggcctggagcacaggccaccttctgatgcactgttgccacctctgcaaagtctgagcagtgaggactgggtggagggaggttgaacatggggaagctgccctttctctcttttattttatgacccagcctgttactcatttcgaacttgatattaaagctgtaccaaattttattacagtgtttgagaaactataagagaaagaattttttttttttttttgagactgagtctcactctatcacccaggctggagtgcagtggcatgatctcagcttgctgcaacctccacctcccgggctcaagtgatcctcgtgtgtcagcctcccgagtagctgggactacaggcgtgcaccaccacacctggctaatttttgtattttcagtagagatggggtttcaccatgttggtcaggctggtctcgaactcctgacctcaagtgattcacccaccttggcctctcaaagttctgggattacaggcgtgagccactgtgcccagcctagagaaagaatttaaacctatctgcttcattctacttttccagaagtccaaggaaagagtgtcctggaatttaaacccttggcacgggtcacttcctagatgctcctggttcatcattgtgcttccctgaccccagggccacaccctttgctgcagaaggacattttttccaacttgagccctgcaaacatttatttattttgtggggaagttctactctgtacccacagagtttcataaatttttaaatccacttctgagtatttataaaaagccagtgaagttttaaaaatccatttcagatccaatagattcccctttacctcctcccacctctgcagagccctgatcatgcttctccatggggacttagagttgggagaaggcttgatctgctttttctctccttactcccctctctcgggacactcttccctttgagtggggaagaaagatggaaagggatgaagccgtcattctggatgatagctttcccttgcttgttgcctctttggctgagatagacccagtgggggtgctcactgatggtgggcgtcccaggctggttccttcttggagtacatatgtgggttctatataggccattcagggttagggaagggttcctccctaggttttggcccaattctctaacgtgagagatcagctctagctcagtcttctgagtcccaccccagcttttgctggcaataatacgccctgccatttcctgttgctgggactgccaccttgtggtggccttcttgttttgggtacaacaggacagctcaagctcagctgcctcctgcagtgtccccctgagccacaggaaactcaagcttccttgtaacactgaatagcaaaagggcttgcttcccattgctggcccctctctgtcatgtaagtttttatctcccctgcccataagcagatatcccactgtagatcaagacaaatcctcttattcctgacacctgcaatggctatgagtgcttcccttcctttcttctcttccttcctggaaaacatcaaggctgtctgtactgatgacccacaaaaagcaaccccttttctccccctcttcccaatcttctgcttgtatggggtaggggaatgagaggggcctggggatagttgggagcagcagagctggttatgtccaacctaataaaaagtcttcggggagtatatggcctccagctgttggcagctctcttcagaatgagagattcttgatatgtctttgcctttgactctgggtcttggtcaccaattctgcaacaatgaaaatagtcccatcaacaccactgtatgcaggacaaaagatccatattatctacctgtccactttgaagacttaagttgaaagtctctggaactgaagttttgaaatggccacgaacatgcctgagcacactgccaggaaatggtgcgtcaagagaagcctgttcgattgtacaaaggcctgtggccttgaagggtgacctggcccacagtacagcagcatcactgtcccctagtagatattttcgagttaagagcagaaattaaaaatgcacaaagttaggagaggaacacttgttttccagaaccaggaaaggcattttggtatataatgcatttccattaagtagaagtaacttgaaaaaaattcatattacatttactataagagtttagttgcagaaaccccagaatttattggatttctaactttttttttttttaaagtattttaaaactgtgtctatattatttggctattttagtaaataactcaccatacttgtgtgtaagtgcaaattcttgaagttttttcttttttcaaatggaatctgttaatttattatcatagaaataggattacctgttgtaaaaaattcagctggtaaaaacatgtacattaaatgcaccttcaggctattttttttttttttaacctgaagtagaagttactgtggaaggccaggcacaggtagatcatttgaagtcaggagctcgagaccagcctggccaacatggcgaaaccccgtctctactaaaaatacaaaaaaattagccaggcatggtggtgtgcgcctgtaatcctagctactcaggaggctgaggtgggagaatcacttgagcccaggaggtggaggttgcagtgagcagagatcacaccactgcactccagcctggatgacagagtgagactctgtctcaaaaaaaaaatagaagttattgtggaagggtgcaggggcctgttaccatatgaagtggtaaagacagtgtctctgccctaagcaccatccagaaataccccctaaacctctatcgccatgacgttttgaacgggccatgggggtaatgctcatattatcagtggggatggcaggcctcttgttgaagtagtcagaatcaatgccctcctttatcctctccatcctgttctctgcacagccttcctttcctgatgccccccaagcatccctgatgctctgatcactgcgttgatgtatctctttcatggctaaaggccccagtgattctccctgtagtccacttaggtgactaacatggaggtgtgactctgagattcatagctcccttgtggctctaacttatcaggaaaagagtagccttttctcatcagggctacttttgctttgattccatctttcaggttctcatgacttcccaattcacataaagcttgacacaaattacccagtgcctagacagtaagaaaacatcagcctacctggaaaactacatcccaaatcatgtattcttgacaaccaccagttttgggggattgccctgaccctcttgctttagagtgaggtgccattcaaaatgcatatttaataaccagttgtcttgggtgcctgatcaaatcagtaactgaccaatcagtatggccaaaccattgcgtactggctgaatatcagattgggcgggaggccaaacagacaggcctctgggccatgtttccagtagattagttttgtttggtattcggagtgattttgaaatatggtatgtgtttgagagcctttaggctaagcaggcattcttcaattcccagtctcccctcttgttccctgtcctagagttggctggctttactcatttatgttaccctgggttgctgaaaagcatctgcttgtgctaggctgctctaaacctttccttgtggcctggtctctatccggcagctgataggtccaatttgtttcttactacgtcctctcagcttgtctccatgtgcataggccttcatacaagaggaattatatgaagcccccattcgtggggcctaaatttccatagaggtaggcttcttattctggatctgaattataccaatatttctgtggcacattaaatgataatttatttggaaatgagagactgcatatacaaagacaatggccagactgtatatgaaaatagaacagcttacacctacctgcccagaaaaccaactccttgtttctaacaaacagcccaggaaaccagcctgctttaagtcagacttggagggggtcagatgctatctagggcaacggtctaggaacttaacaatcacttctggaacaattggtctaaaacggccaggacttgaagaatgactgacagcttccctaattcttgtccccacttccaacttaggaccaaccagagaaatgcaaatatgcaacaggatgccagtttctagctaggcggcccacagcttccccatgccagctgcctgcaatcaaggcacatgagaaggcttcccccttttccactgtagggcttttccactctgcctgcctttgagttcttggccaaaatgcaactgatggtggccgactcccttgttatagcaagccctgaataagtagacttttcttttctcctttggtttatattcatttagtttccacagaaataaattcaattacatttagataatcaaaataatagtaaaggccgttagcaaaatggcaaaatggagaggaaaaataagaatcttgtattccgtaaaagtttaagaggagtttgtttttcaggatgctttgaatctcctccatagatcacttctccaatttttcctgtcaccacagaaatttacaatattaataaaacaactcgttaaaattttgaactttgctactttcaaactgaaaactttttgaagcttaaggcagttatttctgcaaaagatggcttcaggtttattaatttaaaagaatgcaggcagtttttgaaatattatcatctaagtgacttttttctacatttataaatactctactgtcccatcataattaaaagaatatgaaaagagtttgaaatatacttatagcttaaaacatggaaataattctttttaacatgaataattatcccaccagttttataatctaataaaaatcaaagtaaaagaaaaatgctaggcattttaattatgagaaatcatatgtattctgggaacttagaaacgttacccacatatttgtactccagaatcctcattctagaaattctttcctcaaagatgttgcaaagaagtggagcgcgtatgtgtttttgtcaacatgacctaaaacttataaagctctatatgaagcatacctgttttcaatccaaatttaacggtaatttacttcacatttgaactgggatgcagactagaaatccatagtctttgcatatgcttttcttatttattcctctaaaattataggaataagatctttatttatttatttatttatttatttatttatttatttatttatttttgagatggagtcttgctcttgtcgcccaagctggagtgcaatggcatgatctcagctcactgcaacctccacctcccgggttcaagcaattctcctgcctcagcctcctgagtagctgggattacaggcacctgccaccacgcctggctaatttttgtatttttagtagagatggggtttcaccttgttggtcaggctggtctcgaactcctgaccttgcgatccacccaccttggcctcccaaagtgctgggattacaggcgttagccaccacaccctgccctgacctttattattcttaactctaggcagagagaggtagaggagagaatactgtagaaactgttttgtgttttctaacttttcaggaatcactttagagttgactataatatccttcatacatatgcatattactcatattgtgatttttaaattgtaaatccttcagagaattccccaaatactccctttctgggtgtctccattggttgatgtattttgaagaaatggatatcaaaggtgttcaaggaatactttttggcaaattgattaaatgcaaactgattttatattagactcaatttggaagatgagtgtgctgaaacagtaagtcacttaacgcttattttgtattatttgatttactcctccctactcttttctagagttaattcacattgactgtatatcttttgatttattaattattcccctgcctcttgtgtaaaataagaataccttatattcacctgatcttaggtttttatggattgaaaggagttggagggctggttataacttggagtgctaggccgtgcccctagagtttctgattctgtgggcctgggatggggcccaagaatttattgcgtgtataataagtcctcaggggatgctgatgctgccagtctcaggaccacactttcagatccgctgctattgtgccatctataagttaatatgaattccacagcacacttgtatgtgtgtgcctgtgtgtgtgtgtatgtgtgtgtgtgtgtgtaggcagtgttggtggtggtaggaataggggtatggtttgaccaggtaggacctggacatagaaaaggttgcaggtatagatcattgtgagaaggccacggaggtcctgaaggatcccaggtcccaaaggcataaggatgaagggaagagagaaagaaaaaccgacatgttcctgacagctggatgcttctcccatttagatttctctgaactgaaattctagatggtttaattactccataaggtttgctaaattgccacgtctcagcctcacatacaatgctggtatctacattctatgctctcagactatgtattaaaactgtgcactggtggagtaagctagttaaatatttgtacatttgactgcacacagctactgcttatgttttcttgttcttctgctctatcttaaggaatctgtatgagtcagccagttaaaatgctggctgggaggtaattagctgggaattttaaccccatcatagtcattcacctgcttgaagaatgaagtggatgggtactttagtgagtctagcaactgtttctttctctgccaaatgcaagaagttcttcgtgagttgctggatggctcaaattatattctggagcttatcctggaaacaggcaaatgtcagtccaatggaacatcagcgcacattgatatataaaattgcaggtgatgaaaggctctgaaagaactctatgagtctctggtcttaacgctctcttagattttgatggtacattgtctttttcatttcaactctgttttaaattttttattatgtaaatttttagacatacccagaattagagagaatagcataataaaacttgatggtaccattaattcagtctcaataattgtcaatattttgtcaattgtgttttagtcagtccccactcttggtttccttgtggcctgatctctatctggcagctattaactccaatttgtttcttaccaccatttctcagctcgtctccacgtatgtagaccttcatccaagtggaattgtgtgaagcctcccctggctgtgggaactacatttccatagaagtagcctccctattctggatctgaattataccaagagttcagtggcacattaaatgataattgatttggaaatgagaggcacatatacaaagacaataaccagagcatatataaaaatagaacagcttacacctgcccgcccagaaaaccaaccccttgtttccaacaaacagcccaggaaaccagcctgctttaagtcagagttggagggggtcacatgctatcactggcaacagtctaggaagttaacagtcacttctggaacaattggtctaaaatgaccaggacttcactaattttattggtaaatactttaatatgaatctctagcagataagggctttaagacaatataaccacaatagtatcaccatacttaacaaaattattattttaaatatcatcagtccatgttcaaattgccttgtctcaatttttttttttttttttttttttttttttttttttttgagatggagtctcgctctgttgcccgggctggagtgcagtggcgcaatctcggctcactgcaagctccgcctcctgggttcatgccattctcctgcctcagcctcccaagtagctgggactacaggcgcccaccaccacacctggctaatttttttgtatttttagtagagatggggtttcaccgtgttagccaggatggtctcgatctcctgacctcgtgatccactcgccttggcctcccgaagagctgggattacaggcgtgagccaccgtgcccggcctcaaaaaaattttgaatagtacatttgttcatatcaggagctgtatgagttcctttgttgattttggttgatatatctcttaatcctctattattatttaacactttctcttccccctttttttcaagccatttatttgttgaaaatatgtcatttttccagttgaatttcccacatcctggtcttatgtgattgtatcctgtggtattgtttatataccccatatttcttgttaactggcagttaagtcaagaaacacaattaaatttaggtttatttttttcagggggcaaaaatattttatgggcagtgtttaaatcaacaggcacccaatgtctacttgtcccacttttcatgatgctgaagttgatgggtttagatgtcatcattcacccattatcaattttcccatcaactaccatttatgattcttgccaaaatccattgtctcggcaggggttgcaaaatgacatttttcgaattatttttctaataatcattcttttttaattagaattcttctgtggagaagaactttccctcacatctatttggttaacctgaagcacagttcataaatgagaggcaaggtaaatgctgtattctgtacctttatttatccaatttcagagcaatgagtccagcaacagccaaaaatgattagtgtggttttcatttttcaaaatatcattatgaacttacacatttaatatatatatttctgttatatattaatatactaaaagatttgatacgttgtatatatctaaaatatttaacatatttgaatcaatgagtttcagttgacaatccattgtaatgaatgctaaatttgtctccccgttgtttaataggattgctcttaaactcagtgtaaaactgcttgcctactatcctgtttatttttgaaatacaactgtacttagtattaaaatattcctattatagaaaatttagagaataaagccccacataaagaggaaaatgaaaattacctgtattcttcccactcaaaaagattcccctttataaatgtcaaatttccctctattgtcttgctcttttatatatcattaaatactcttcaacctgtcattgtagtcactctgtcagaagtgctttcaactacccctcatcttagcctcattgcacatgtctagccaaacctcaaccctcttcacctctgcacctgtgtctgttactggagactattaactgaaccatttccttcatttgatgatctaaagcctccacaggcatgcattgtgacccagaaaccttcttgtgtttcccagaactattcatatattctcctcaaaccctcccccaacccttccctctttagtcctcactgggctattgaccttgttccacacttcagtgaagtaaaaaccttcacatgatgactctagcattcccgatgaaaacttaacaaaaactcctctgcagctaatgctcccttctttcctcctggcacaatggagggcattttctctctcctagcaaagtccagtccctccccttctctgtatccaatgctcgttgaccttttaaaacacttcactctggttatcttctctcctttatcaacttgcccttatcatctactggatcatttctgtaaccatattctaatttaccaaccctatcataaaaacaacaccaacaacaaacacagtcacttccttggttccctgtctcccctgtctcccatccatttctgtattattttgcattgccagacttctcaagagttgttaactatgtgatttccacttttttaactcattttttttattccagtctggttcctctccagccccgtcactgtactaaaatttcttgcctcagggtcactggaaatccacatagccacatgcaatgtacacttctctgtcttcatcttaccctttcagcagcattgggtggagtgggccatttgtttctcaaaatactcttctcttggttatcatcaggccattggttctctgctttccaaactcactggtttctcccagctgctatttctccttttaagtgttgacagtattgggtcctcttctcttctcctgttatcatttttcactgggtggttccattaattcacagctttaaaaatctcattatgactcaagactccaaagtttgtgtcttcaacccattttttctgagcaccatatccagctctgcttacttgacagttcaacctggatgtcttacaaacatctcaaattaaacgtgtccaagatagaacttctcatttcccctgcatgaatcaattcctcctctatctgtcctatgccaataaatggcagcattatccgtcggttgcccaattcagaaatctgagtcagtcccgattttccctttcccataacccctatatagcagttgcagcaactccatttgattgttccccctaaaatatcttgactgtcaacttttctctgtctccatggtgaacaccctggccatggctcatccttcacctgcactatgtcagcacctcgttgaagggtctctcaattcatacttgttcctctacaatccattttccacattatgagcaagaacataaattaaaccttacattaaaaccttcagcggctttcattacatgtgtaataaatccaaactctgcacaagggctggatggctctacagatcctgtctcctgatatctctccagcctcaggttaagctactccctacaccagagtcagtcttattcaaacacacttaaatcttcctgcctcaggctgtttgtatctgctgtaccctctgcttaaaatgcttttctccgtactgttgccatgtgtgacttcttatccattggaaatcagcttaaatattgtcatgttgaagctttttctttttctttttctttttttttttttttttttttgagacagagtcttgctctgtcgcccaggctggagtgcagtggcataatcttggctcactgcaacctccgcctcccaggttcaagcgattctcctgcctcagcctcctgagtagctgggattacaagtgcatgccaccatgcctagctaacttttgtatttttagtagagagagggtttcgccagtttggccaggctggtctcaaacctctgacctcaagttatctgcccgccttggcctcccaaagtgctgggattacaggtgtgagcctggcccatgttgaagctttttctgactggtgtaattaaagtgcatctccctcagttattttctattttatcttcttgatgattatattcatagccattttcacactatataaatatttatgataatcatgtgttgcataataagagggatacgttctaagaaatgcgtctttgtcattgtgcaaacatcacaagtgtatttacacaaacccagatggtatagcctactacacacctagcctatgtggtatagcctattgctcctgggctacaaacctgtacagcatgttactgccctgaatactgtaagcaactgtaatacaatggtatttatgtatctaaacgtaggaaaggtatagtgaaaacatgatattataatctcaggggaccaccgttgtataagtggcctgtctggaatgtcattatgtgatgtgtggctgtatttgtttttttttttttctgttttccatcctgaatgtgttacaggaaaggggtccagatccagaccccaagagagggttcttggatctcacacaagaaagaattcagggtgagtccgcagtgcagagtgaaagcaagtttaagaaagtaaaggaataaacgaatggctactccatagacagagcagccccaagggctgatggttgctcatttttatggttatttcttgatgatatgctaaacaaggggtggattattcatgcctcccctttttagactgtatagagtaacttcctgatattgccatggcatttgtaaactgtcatggtgctggcaggagtgtagcagtgaggaccactctcgtcgccattttggtattggtgggttttggccgtttcctttactacaacctgttttatcagcacagtctttatgacctgtactttgtgctgacctcctatctcatcctgtgacttagaatgccttagccatctgggaatgcagcccagtaggtttcagcctcattttgcccagcccctatttaagatggagttgctctggttcacatgcctctgacaaatacaatcttcgtgagagtcaagaatacattgctcactttcaaatcttagtgtttagcttagtgtctggcacatggtacactgtaatcatgtgttgtattaatagaataattctacattattgtttttagtggcaaacgttttctgaattcttactgtttacagacccaagcctggttcttgagaacacactgttgaataagacaacatggccctgttttcaaggtgctcccatctaccagagggtacaattgtgtacctaggcagatacaaaataagcatgcttttgtacaagtagattcaaaatcatataatgcaattaatctcataggagaagtatagggcacttttggatacaataaaaaggacacctttgggggcacatttattttaataaaactctcatttgacacaggctctttccaatttttcactattttatacatctttatagatgtatattatgtataatctatacatagtccctagaatggaatcttaggacttactgggtcaatggtcattaaataattttgaaacttgggatttcacctccaagttttgcttttctaatattaagtggcatatttcctatttcaaagtgtttttgccatcattggcaaatttgaaaatttgacaatttgtatgagaacaatagtgtctcattattttaattttaactacaatgattattagtgaagtaaaacttttcttgaacctgtgtttgccattttgtatttgtctctcagattgcttcatgttcttaacttatcgttatattaaggcgttcatcttttccttgatttataacatttctttatatgttatagaaacaatgacattacgatatatgactttattatatcattatatatgatagtgctaacttcattatcatatatggtctaagtatattttcccagatcttcatttacttttaatttttgttatctttatgtttttgatgttgaaggattacatatttaatcttttaaatatcaaagttttaatttagaacttcttagaaagactttttctgcctaagattatgaaaataatcatccatcatttacttctagcacttacctgttttcattttttcatggttgaaaattaattggtttttccaaagaacattgctctttacacactttttctccctaatttgatctgctaaaattatttgaataaagatgggaatcctcaatttttagctgcgcaaagaccagaggccctcctgaatggtcgttattaattttccatgctcttttgtggaatgtttggcatatgactgagttacaaataatggatgaaggctgaagtcataggtataacttccagaaagtatacttggagggtaggtattatgcatctttctcctttttcctttctgcagggtaaattccagacatcatatttttagctggagaatccatattggcaaaggaccacacacactagtatagcaatgcaggaagctcagcatatctggggtccccagtgactgtggaacttctatgtccgcccagactgcctgcttctgactttcccccacttttttatgtcagatatttaatgtgctaatgatgtaacaaggtttgagggaggcacgtctcactcatgagcatgcaaacccaatcatcacacttacgaaccacaaaatggtctaattctggattttttaaaataagaaatcaaaaccacatgttttaaagccactattaatttagtttatcttagctatttcaatatcatgttatttaatagtttgtatttttactctacttcgcagtttttattgtcttatattttctgattttgagccatattttgtttgtttcagtttctcatgatgtggaagttacatatcctcctcagagtcttctagtaattgactttaaattttaaagatacattctttaacacatttttctttagttatcaaggaatttgatcatttgtcctcatttgaaatagcatgataaatttattgcacttttatatttgtcttctaccatgctagactttgctaatacaacccatgtaattactcttacattatttataagaatttcatgtattttttctttttaagtttactttgtatcatttgtatttgtgtttgtattaatgcttatttagattaaattcaccacagtaataatttcagttcttgatactatttattttctaatacaatgctctcaggcttgtgatcttaatttttctttccatctctcttttttttttaatttgagacagggttttactctgttactcaggctggagtgcagtggcgcagtctgggctcactgcaacctccacctcccggttcaagcaattctcaggcttcagcctttggaatagctgggattacaggcgtgcaccaccacgccaagctaatttttgtatttttagtagaggggatttcaccatgttggccagactggtctcaaattcctgcccttaaatgatctgcctgcctcggtctcccaaagtgttgggattacaggcatgacctacggcacctggcctctttctttcttttcttaaagacatttttaggattttttttttcccaagaaaggtattattataagcccgtatataagatcttaggtgtttaaaaatatttttcctgttgtctgaattgaaaattcttacgttccacattgttttccttaaaactctgtaaacatttcctgtgtgtgtatgtttgaaacttaatgctatatggaagtataagatcatcttgacttcgttttttcttagtgaccaggttttttccaagtgaatgtttacaagatgtctttctgttttgtagttataaaatagtttcagaatgctttatgtgtaatttatatattcatctatttattttgtggatcatggggagtgagtctttttgcttgcacagttaaggctttttcagctcaaatacattttctttgttgatgattttggttattgctttgcttgtaattatcttggtattctcctaagaaagacactaaattatttagttggctttccaaactctccttcaagatcatcatcttgctcgtcacttgtatctttgtttttcccttttcttttaaaaggttctgaaatttgcccttcaccagatgcctttgatttgtcatggtgacatctgcttttcatgtgctctttttccctgctattattctttcagtctctctcctctgcccttcctgcgcacatcatctgcctccttttagtaagtagtgtgttattattatgattttaaaatctcagcttgagatttaatttaatttcatcttttcatctcttcttgagttcatgtcaacctattcactttttgtgactccttgaagaagccaggctgtcttgtggcccgttgaaagcacctagtttcctacagcttaattctggttctttcagtagataattttcagagattggttctgtctctgagtctatagttgttgttccctttttccttagtctcatattgtttgcaaggccccatgctctcttttaaatattttaatttaattttattttaagttccaggatacgcgtgcagaacattcaggtttgttacataggtatacatgtgctatggtggtttgctgcacctatcaacccgtcatctagatactaagcccctcacgccttagctatttatcttgatgctctccctccccctcccccactccccaaacaggccccaatgtgtgttgttcccctccttgtgcccatgtgttctcattgttcagctcccacttataagtgagaacatggagtgtttggttttctgttcctgtgttagtttgctgaggataatggcttctagctctattcatgtccctgcaaaggacatgatctcttttctttttatggttgcatagtattccatggtgtatatgtaccacattttctttatccagtctatcattgatgggcattttggttaattctatgtttttgctgttgtcgatagtgctgcagtgaacatacatatgcatgtatctttatgatagaatgatttatattcctttgggtagatatctaataatgggactgctgagtcacatagtatttctggttctaggtctttgaggaattgtcacactgccttccacaatggttgaactaatttacattcccaccaacagtgtaaaagcattcctatttctccacagcttcaccagcacctgttgtttcttgactttgagaattgttattctgactggtgtgagatgctgtctcgttgtggttttgatttgcatttctctagtgatgttgaacttttttcatttgtttgttggctgcataaatgtcctcttttgagaagtgtctgttcgtgtcctttgcccagtttttttttttttttaagtatttattgatcattcttgggtgtttctcggagagggggatgtggcagggtcataggataatagtggagagaaggtcagtagataaacacgtgaacaaaggtctctggttttcctaggcagaggtccctgcgggcttccgcagtgtttgtgtccctgggtacttgagattagggagtggtgatgactcttaaggagcatgctgccttcaagcatctgtttaacaaagcacatcttgcaccgcccttaatccatttaaccctgagttgacacagcacatgtttcagagagcacggggttgggagtaaggttatagattaacagcatcccaaggcagaagaatttttcttagtacagaacaaaatggagtctcctatgtctatttctttctacacagacacagtaacaatctgatctctctttcttttccccacatttcccccttttctttttgacaaaaccgccatcgtcttcatggcccgttctcgatggtcgctgtctctttggagccgttgggtacacctcccagatggggcggctgggcagaggcgctcctcacttcccagacggggtggccgggcagaggcgctcctcacatcccagacgatgctttgcccagtttttaatttttttttttttgtaaatttgtttaagttccttgtagattctggatattagacctttgtcagatggttagattgtaagaatcttctcccattctgtaggttttttgtttactctgacagttttttttctgtgcagaagctctttagtttaattagatgccatttatcaattttagcttttgttgcagttgcttttgacgttttcctcatgaaatctttgcctgtgcctatgtcctgaatggtattgcctagatttttttctagggtttttatagtttggggtgttaaatttaagtctttaatccatcttcagttaatttttgtatgaggtacaaggaatgggtccagtttcaattttctgcatatggctagccagttttcccagcaccatttattaaatagagaatcctttctccgttgcttgtttttgtcaggtttttcgaagatcagatggttgtagatgtacagtcttacttctgagatctctattctgttccattggtctatgtgtctgttttcataccagtaccatgctgtttaggtaattgtaaccttgtagtatagtttgaagtcagctagtgtgatgcctccaactttgttctttttgcttagaattatcttggttatacaggctcttttttggttccatatgaattttaaagtttttttttttttctaattttgtgaagcatggcagtggtagttaaatgggaatagtactgaatttacaagttactttgggcagcgtgaccatttttgtgatattgattcttcctatccatgagcatggaatgtttttccatttgtttgtgtcctctctgatttccttagcagtagtttgtagttctccttaaataggtccttcacttcccttgttagctgtattcctagatattttattctctttgtagcaattgtgaatgagagctcattcatgagttggctctctgcttgtctattcttggtgtgtagaaatgcttgtgatttttgcacattgattttttatcctgagactttgctgaagttgcttatcagcctaagaagcttttgggctgcccaagcccccttttttttccctccttagtcataaaggaaaaaacgatctagatttggcatcttccatagaaaagaggaataggtatgtttgcctttctcacatggacagtcgaaggcgagtctttgtgggtagtcccatctaaagtgtctaggaagctcctgtggacatggtgctggcgtactgaagtgggatcttctactcctgcttgattttctgaccttctgagagtgagatggtaaaaactgaaatctccagcatggtctgccactagaaccttcattcttgccctgcctgccccacagtgcttaaaatattagaacaatattgctattgctcaagaaagaaccacttctgctagtgccagtgactcgctgtttcttgaaggagttacaagctttgaaaacatgcaggaaaatgatgaggtagaaacattctgatcacctcaaaacagtacctgttcagtagtgaagccacagcttttttttttttttggttattagctagggcagactgatatggacattcaagatgccattcactttatttggacaaagctgggtggactacagattgattttcacaattccactccacctaattcatgatgagaaattctaaagccaggtatggtggctcacacctgtaatcccagcactttaggaggctgaggcaggagaaccacttgagcccaggagtttgagaccagtctgtgcaatatagcacgacctagactctaccagaaaatcaaaaaattagctgggtgtggtggtgtgtgcctgtagtcttagctacttgggaggctgaggcaggaggatcctttgagcccagaaggttgaggttgcagtgagccctgatcatgccactgcggtccagcctcagtgacagagcaagaccttgtctcaaaaaaaaaaaaatttttttaagtaattagggtgttattttttgcctgtataaagtgttttagcaagactttggagggggtgctgtagggggtgttaactgggtaccctttaaacaggaaagtccccatgatgtcatttctggattaaaaggtatgcatatgtaattgacatttcttgaacgttcataatttgccaagtaccatgcccactgcttgataaacattatctaacttaatctttataataaccctatgaagtcaatgttatatggtttctatttgcagatgagacactggcataggagggtcaagtaaccttcccaaggtcattgaattaagggtaggaggccacatggtgagggttctcatgaatgccttctggctccaagtacatggccttataaaaagtcctcctcaaacccaggtacctggaagatagaaaggactttcttttttcttttcttttttttttttttgagatggagtttcactcttattgcccaggctggagtgcaatggcatgatctcggctcaccacaacctctgcctcccaggttcaagcaattctcttgcctcagcctccaaaatagctgggattataggcatgcaccaccacaccaggctaattttgtatttttagtggacatggagcttctccgtgttggtcaggcttgtcttgaactcccgacctcaggtgatccgcccgtctcagcctccgaaagtgctgggattacaggcatgagccactatgcctggcagaaaggactttctaataactttctattgtctttaattttggagaagtggctcttcctcattgctataatttaaatgcatttgttacagagcaagttttctactcataggctgcctcttttaagggaggcaaagggagcttcctttaatcatcccattatgagacaattcttttgacttaaaatttgctgcaacctgtgacctgggaagagaccatctaggcaccactgtttatcttctaccatctcatttctagtccagccacccgggagtgaagtgatctgaatctctcaaatgccagttgcttctttttaatcttgtcttctaggaaaacaatttatcctcctattagcaatataaattccagtgatctatccttggaaaagcctattcaaacataaaaatactgactttgatctgataacaacttcataagtatatactaggattccaatttaaattttggcttgtgactttttgaatcagttccttcctcctctatttcttaattagtagacccatgagaaatcaaaatggatgaaaggaaggggagatatgtacagttgctgaatgataggataacttaatagttcttcttgcattaggggcagaggagctgtgaaagagaagggcacactttccttaaatgcctgctctgtgtcaggaactatattagatataactagttggttccacttcagaacactgctagacctgaaccaggacctactgactcataaaagtttagagttggaaagaatctcaaaggtcatttagtccagccctcacccattcggtgagtcctccaacaatatgttattttgtgctttctagtccccttttgaactgtgtattccccactgcagcttattccatggttaataattctaattatcaaaaagttttagcatacattgtatataactctgtctccaggtaatgtccacccaggattcctctttctatcctctatagcccagacagtatgatgcctccctgtggcaatcttccaggtattgaaagttggacatgaagtggcccacagggctcctccaggccaaatgttatcaagatgagtttagacttagggttagtgtgactcgagactcaccagccaccttcagggttcctgcagccctccacatctcatttttccctgtggctctgggctaagtgtgcatagttgatatcattccatagcccctttcctctaaataaatacttctttaggcatcaagatgtattattatccatatattcactaccatttaagtgtctaaaaagtacacatgctttatgtatattaactttatcccacagaaaatccttggatgataggtgttagaactatatgaaactgtcatctttataggtcagaaatggttgaatattagcaatttcaagtggcttaattattacaaatcagatttgacagatgagaaaaatggagacttggaaatgttgcatatatcattcaagcccacaaagccagcaagaggaggctgaggtctacacctgaatctgtctagctctaaagtgggcttgtcctgctgcacgtgctgtttccatatgcattatcttgcagttgcatatgcaacattcaaagtaaagatgaaggggtcacagtcttttggaaaggaaagaggaatttgagacatttacatgtttgctaagtaaatctttattccccatgatgtggtttggctctgggtccacacccaaatctcatctcaaattgtaatccccgtgtatcaaaggagggacctgtaatcctcacgggttgagggagggagatgattggatcatggggacaatttcctccatgctgttctcataatagtgagtgagatctcatgagatctgatggttttataagtgtttggaagttcctcttttgtgcttctctctcctgctgccttgtgaagaaggtgactgcttccccttccaccatgactgtaagttttctgaggcctccccagccatgtggaactgtgagtcaattaaacctccttcttttgtaaattacctggtctcaggtatttctttatagtagtgtgaaaacagactaatacaccccacttactatgtgtatgacctcgaggaatttattgaacctccctgagaaacaattagctcatctaaaattgggttattaatatttaacttgtagtacttgtgtgaggatgaagtagattgatattctgtcaagctgctgcccagtgctcttcgatgcctggcatgtcctgctctacatagagttttagcccattcactcactaactcacctctgtcaaaggtagcccaatttgtttctgtaaagggccagtactaataatgtaggctttgtgggccaagaggaaatttcctcaactctttgagcgtgtggtctttctgaaaggctaatagtcctttttatgttttacttttaaaaatgtaaaaactattcttagcacacagcccatacaaaaatagatgtctccagcagcttcccactcatctctctctctcaatattccttcctcattcatccagaaaacaggagctatcagatgggatgggctccctctgccatgcctcccttcatgctgcccacattctctttcctgtctctgtttttaattttaatttttaattttactgttttgggacagggtctgtttctgtcacccaggctggagtgcagttgtgtgatcttggctcactgaagccttgaccccccaactcaagcgatcctcccacctcagtgtcccgagtagctggaattacaggtgcccaccaccacacctggctaatttgaaaatttttgtagagatggggcctcactctgttacccaggctggtctcaaacttctgtgcttaatggtcctcccaccttggcctcccaagtgctgggattacaggtgtgagtcaccacacctggcctcttttcatctctggtcacagtgaaggagctcactggtctcctgacccagccagccccttcaattgtacattatgtcctgttgcctcccacttattcaggaatattgttccatccatcctcttctatctcctttaaagcactaatatttcttcactggatcttccctatcaacatgcaaacatgctatgatttgtcgcattctaaaaaattcccttgactccactttctcctccacctgccacttcatatttctcccagcaaaactccatgaatgaattaactacataggctaactccaatttcactctttccattctttcttcaccattactctatcaaggtcagtaatgaccttcaggtactccaatgagcagttctcagtcccccaggactgactttgccacagatggccacagggtcattcccttctttctcgatgagcccttcacttgccttctgggataccaggctgtactgcctttcctccttagttgctgctgattccttctcagcttcatggtctcttgattttggagtcccaaggattagtccttgcatgtcttctatttttttaaatctgcattcactctcatagtgattttgtacaacctcatgactttaaggaccatccatatgttgatgattcctatatgtatatctccagcctgacctgtttcctgaactccggatttatatacctgactgtccattcaacatctccctattaggcatgtcaaacttagcatggccataactcagctccttatattctatttcaccaccaacaagattggctcctctcacaatctttctcatctctgaaaatcacaactctattcttccaattactcaggctaaaaccctggctttactctttttgaaaattattaaaatcaactctatgacatatatgtccagtaaactgtaatgtttaaagtgtacaactcaatgagtttgggtatacacccataatgccattgccacaattaatttacagaacatttctatctccctttgtcacccattcctcccttcaagtctgtccccaagagaccactgatttacttttcatcatggctagtttacattttccggaattttatatagatggagttatacagtaggtactctcgttatgtctcttttacttagagtgaatattttgatatttattcatgtgtgaaatggtagtttgcttctttgtgttgtgattaacatttcattatatagacacaccacgatttgcttatgcattcttcatgtgatgaacgtttgacttgctcccagttgttggctattatgattaaagttgccatgaacattccatagtggtctttgtgtaggtatttgatttcatttttcttgagtaaatcacctaagagtggcatgtttgggtgggtaggtgcattgtgtagcttcttaagaaactgccaaataattttccaaggtggctgtaccatcttgcatttccacgaacagtggattatagttccagttcctccacattctcacttgactatatctttgctctctttttctcatgtccagcatcccattcattagcaagttctgttgcccaaaccttcaaaatatacctagaatcttatcccttttcatcctattactgtgaccatttgggtctgagacagtctcatctctcattggattttttgcaatagcttcctgcttgtacccttgttttcttcagtgttctaacacagcagttgaaataaacctgttaaaatataagcagcttctatcattccactgttttattttatttgagacaaagtcttgctctttcacccaggctgtcataaccatagttcactgcagccttgaactcctgggctcaagtgattctcctgccttggcctcccaagtagctaggactacaagcacatgccaccacacccagttaatttttaagtttttgttgtagagaggtgagtcttgctatgttgcccaggctggtcatgaattcctggcttcgagggatcctcttgtctcagcctcactccactgtttataactctcagtgccttcccatctcagagctgatgccaagacatcccagtgcatatctggccatccctcgcactctttacctttccaccctcctacttctcttcccctcttttctttctctctatgctgttctttgaacacacaagtatgctcctatctcagggcctttgctgatgctgttctaaggctcccttctttcccagatatatgtacatgacttgcattctcatttccttcagaactttactccaatgacacttttcctatgaagctttctgtgattcttccatttaaaattgcaccctccccacactttgtttcatttccctactttattttttgtcattacacttatcaccatttggtattcaatatatatttgttgatcatctactgtgtgctaaggatcattctaggtcccagggatgaaaattaaatggaacagtcaaaactctatcatgatagaatttgcacatatattactaatttatcttgcttctcaattgtttcccattcactagaataaaagcgttgtgataacagggatgctattggttttgttcagtgctgcatcgctagtgcctagaatgcctggcaaatagtaggctcttaacaaacaccaagctgttgtctctttttttttcctttttttttccaaataaaaaaaagcaatccttgctccaagtgtggaatagattgctgcagtgtcatactttagaccttgagggaatctgcagcctgtgaaaactgaagacacaattgaattgctaattaaagatcggaaccagttcaattctatgatcctctaaggaaaggattttaagtggtgaagtagtattaatctcactttccagactacttatcatggcagagcaaagttctccttagccccttccaagacctttagaccagcctgagagctgagtgatgaggctggctgctccaccaattgccccttccttaggggacatgtcttttaacacttctttctagaccagtgcttcccgaaatatagtctcttgactacctgcattagcattgatcaacttaaccactgaataagaatctctggaggtgggcttctaaaaatcttcattttttacaaactctggaggtagttggttagaatttgaagcttgcaattatttgttttaaaatctgagttagtgcgtctggatccaggaggattaaattactgtacttgatggcagtatggcaggaagcatccgggggtaaattacaatgtccaggagaggattagaagctttcattaaagctcaacgttagtatttttttggctatgccctcgttacaagttgaattttatattccccccaaatgaagttccaactcacagcgcctcagaatgtgaccttaattggaaatagggacattgcagatgtgatttgttaagacaaggtcacactgaagtagagtgggccctaatcggactggtgtcctcatgaaaagatctccatgtgaagagacacagggagaatgttatgtgaaaataagggattggagggatacatctgtaagccagggaacaccaaaaattgacagcaaatccccagaagttaggaagaggcaagggttttctctacagatttcagagggagcatggtcctgctgacaccttgattttggacttctagcctccagaactgtgaacatttctgaacaacacatttgaaaaatacatttctgttgtcttaagtcaccaattttgtggtactttgttatggcagccccaggaaactcacaggaaacctttatgtttcactaacagctacaatgatattgttgagatgggactgtagatgaaagaacaagcaggagtgataacttcagggatttttagaactcaggaaattttaaatggaggcttgagatttccctaaaggatagacagatagaccactggaagactgggaaaccaagaaaaatgtcaacacctacatgaaagctgatgtatgatgtaagtggcattgttaaatcagtgagaaagcaatggactagataacatgtaggagtgggaaaattggctatccacatgcaaaaataaaactagagctcatataataataagagtaatcccttccactgcactcagtaggtgctgttctaaaaggttttgtatattctaattgcaactttactcttacctatgagtaatattatatattctaattgcaactttactcatacctatgattaggtacccatttacagattaagaaactggagtacgtggaagttaaatgacaggttaaaaagtggcagagctgagaagtgaacccaggtagtctgcctccggactccatgctctcaatcacgatgccatgctgctttgcatctcctagggatgtgaactcaaggttcgttcaacacctgactgtgaaaatagaaactctaaaaatttagaagaaaataaaggataatatcttcaagactttagggtagggaataaagaaaacagaaaacatacaaattatagagataaatattgacaacacaaactacataaaacatttttgttcatcaaaaggtattataataagaaagaaaaatatttgcagcatgtataatcaatagaagattaatatccagtttatataagaaattctctacatcaataagaaaagcacaacaaacaacattatcaaaaaatggtcccccccaaaaaaaagaacatggaatctcacagaaataataaattacaaatactgatttgaagagattattaactccactagtaatgtggataatggtaaaagaaatcactgtgaggtataatttgacactcatcatactggcagaaaatttaaagtctgacaataccaaatggttacaaggatataaggcaataacaattcctatgcacagcaagggggaatttagatttgtgtagccactttggagatcaattttgcaatatttagtaaagttggaaattaatttcctctgtgactcagcagcttttactctagaaatataccctaggacatcttgcccatattcccagggagacagagccaaatggtttattgtagcaaacacttagaaacagcttcagtagccatcaacagaaatgtggattaactcatggtggagtgttcatatgatagatactatgtaatactgaaaattaatgaactagagccaaatacattcatgaaagaacctcataaacataatgttgcttgaaaaagcaaattgaataaaaatatataaaaatttaaaacatacaaataagactaaaagttaaaaaataaaagaagaacatataaaggtaaaaaatatacaatacaaatacatgcacctactatgtacccactgatatggtttggctgtgtccccacctaaatctcatcttgaattgtagttcctgtaatccccatgtgtcatgggagggacctggtgggaagtaatcaaatcatgggggtggttagccccatgctgttgtcctcatgatagtgagttctcatgagatctgatggttttataaggggcttttcccccttttgcttggtgcttctccttgctgccaccatgtgaagaaggacgtgtttgcttccccttctgccgtgattgtaagtttcctgaggcatgcccagacatgctgaactgtgagtcaattaaacctctttcctttataaattacccagtctcaggtatgtctttattagcagcatgagaagggactaatacagtaaattggtaccaggtagtgggatgctgctgtaaagtgcctgaaaatgtggaagtaaccttggaattgggtaacaggcagaggttgtgaaacaggagagttccctgacctccttcacaggacatgtgacaagggtgtggctctctgttcagccactgtgagggagggggagcacacagaggggcagaggcaggaactagggtgagcacttttgggctctagccccgtggcagtgtctaggggtggttgtctgtgactcccaaagaccagtggacacatgttacagtgtactcttttagccttgctctccaccgatagcttaagtgttaaccagctcagtggactctatgcctttttgcaagggcagagggccagtgtgatagccttctggatcctgagctcttgtctagcatcctggaagaattgggtcacacacagacttgaaggatgaatgtgggggttttattgagtggtagaggtggctctcagtgggatgtatggggagctggacaggggatagagtaggaagatgatgttcccctggattatggctgtccagttgccaatctcctctctgaccatacccagctgaactccttttgatgttcagatattccttctcttctctccttctctgctgtgctattctgccactcttctgctcctctgttcatctggttatggagtctggggtttgggatttatatgggtacagaatatggggatgtggtgagccaaaaggcaactttttgagcatgaaaacagaaatacctgttctcagggctgtgggtatcaaggcttgagggtgggaactgctcttttctatccagtagtttcctgtctcctgtccctgtcatttggaacagtttggaggtctcagaagaagataggaaaatgtgggaaagtttggaacttcctagagatttgttgaatggctttgaccaaaatgctgatggtgatatggataataaagtcaaggctgagatggtctcaggtggagatgaggaacttgttgggaactggagtaaaggtcacacttgctgtgcaaagagactggtggcattttccccctgtcctagagatctgtggaactttgaatttgagagagatggtttagggtatctggcagaagaaatttctaagtggcaaagtgtttaagggtaagcagagcataaaagtttagaaaatttgtagcctgacaatgtgatagaaaataaaacctcattttctggggagaaattcaagatggctacagaaatttgcgtaagtaacaagaagccaaatgttaatcaccagcacaatggggaaaatgtctccagggcatgtcagagacctttatggcagaccctcccatcacggtcccagaggcctaggagggaaaaatggtttcctgggccctgtccagggctccactgctctatacagccagcctgcctgctttccttccttctttctttttctttcttttcttttcttttctttttttcttcttttcttttcctttctttctttctttctttttctttttccttccttccttccttccttccttccttccttccttccttccttcctttctttctttctctctctctcttctttctttctccctctccctttctctttctttccttttcttttttgagacagggtcttgctctgttgcccaggcacaatcacagtggcacaatcacagctcactgatccttgacctccttggcccaagcaatacgcctctttcagcctcctgagtatctgggaccactggtgggagccaccatgcctggctttcaaaaattttttgtagagatggggtctccctatgttggccaggctggtctcaaattcctgaaatcaagcaatcttcctgcctcagcctcccaaagtgctagaattcaggtgtgagccaccactcctggccctggggattacgtttcaacatgacatttggaggagacagacatccaaaccatatcactagttgataggtacataggtacttatattattcttcatttccttttctatgtctcaaatattgcaaaataaatttttataaagaaaagagattgggagccactcgggtggagaaagtgaatcatttgaatgtcaaatatggggactataggtcagaaggggctggaagtgccatagtgtttgttccttctgacttcacttctcttttcctattccagaataatgttgggaaagaaaaagtgttataagaatctcttccttttcttctgagatccaggatccttacagttctctcctacagtttgctctccttcttggtttggataggctactgttagggcagtcaagttcagagtgagtacttgtttttgtaaagtcactgtggtttcttatcttttgtgttttccaagctgtttctgatttaatattttctagtgctccttttatgcacatgtttagtgtacaaattctctcagaaataaagtgtgactgatatacagctaatattcctcctccacacaaacaaaaggtcttctagacaagcaacaaataagaatcaatgtgcttggtgtccagaatggcttacagcatatctctctctttggtcagctgaaaagggaggtggttttaactcaagttaataaacagtcctgctattccttatgctctaacatacacctatgtcaacagaaaatatgttggttttgtatgttttcacttaatactttgctgcagtgagttttgcctaaatgtcttattatggtggctagagttctgagtatagaatattactctttttgtgttatttcaatgatactgtcctcttaccagtattgtaggaccaacaggtttgtatgtccactgtgcagtaacataccaattacacgaagacaacagtgtttgcagcagagaaagagtctaatgattgcagggcactaagtaaggtgatgggaggagaccctcatatccatctccccgaggagtcctgggtgggggcttttaaggggatcatgaagtatgaagggctggaatattggggccattaattggtcagtgtatgagatatgaaaccatcaagatgtagaaactcagaatcacataggcctcagaatcacataggcttcttcagggagtcagcatcttgtggggcccttcagaccagctgacatcagtagtttcattgatatacaggacctgaaagaatatctcagatggaaaactcaacatcttataatgttcatgttgttatctatagagcaggtaaggggaactataatcttgtaatgggttgtaaccacccaatgggtttaccttgcccactgcctagacagagccaatttattcagaggaattgcaaggaagaaagagtaattcatgcagagctggctgtacaggagagcagagttttattattactcaaatcagtctccctgagcatttggggattggagattttaaagataatttgatgggtaggggcttgggaagtggcgaatgaggattggtcaggttggagatggaatcatagggggtcgaagtgaagtttttttgctgcctttgttcctgggtgggatggcagaactggttgagccagattactggtctgggtggtgttacctgatccatccactgcagggtctgcaaaatatctcaagcattgatcttaggttttacaatagtgatgctgtccctaggagcaatgtggggaggttcagactcttggagccagaggctccatgacccctcaaccttaatttctaatcttgtagctaatttgttagtcctgccaaggcagactggtctccaggcaagaaagggatctttttgtaaaagggctgttatcaattttgtttcagagtccaaccatgaactgaattccttcccaaagttagtttggcctatgcccaggaatgaacaaggacagctaaatggttagaagcaagatggagtcggttaggtctcatctctttccctgttacaatttcctcagttgtaagttttgcaaaggcagtttcagggtctatgtgattctgaggcagtcatcaccaaacaaccaggaggaagcaggtcagagagcagctggcctagtgatgcacgctgagcctgctgcgagcctggtttagtttccttgctcttcctccgttcttccctgattaattttataaagtatatagggatgatttttaccagcatcctgtgtatcagactcattaattcatgaagaaggaccaaggtgggggtttggggggaaggcaaaggagcctatcactcttttgtttatgataaaacctagaaaactcgtgcaaaaactgaaagtttgccttctcatccctgaaaatctcttttttatagaaatcattattttagttatagtgacagagtaatgctttctcaggaatttagtatttttcattgttgtagattttttgggttgtttttgtcagttgtcggttattgaaatctgatccctctattgaaattgaatttggaagctgaagaatggaaagatttttaataatattcttaaaaataaaaagctttttaaagtggcaataaggctgggtgcagtggctcacacctgcaatcccagcattttgggagaccaaggtgggctgatcacttgaggtcaggagttcaagaccagtgtggccaacatggtgaaactacatctctagtaaaaatacaaaacttagctgggcatggtggtacatacttgtaatcccagatactccagaggctgaggtaggagaattgctcagaccctgggaggcagaggttgcagtgagccgagataatgccattgcgctccagcctgggtgacagagtgagactgtctcaaaaaaaaaaaaaaaaaaaaaaaaaagagtgggaatagtagtgaagtattacctggatatgctaggatttcgatcaagggaaaaggtttcccccagggacagttctctataaaggtcttgcttaggatgtggtgtgggtcgggggagttggccctggagtcctatttactgtgcattaaaaaaatacatcaggcacaattcaaagcctttgtctggtcatcaaaatcctgtgatgctggaatgatgcattttatcaccttgttctcaatcttctaacagaatccaaacacttgaccagctatatgatgaatttcttcagtaaacaatttgcaccttgcagtcatctgaaacagaagaatttttctacataattatttactccttaaaatcatatttattttcctgaatcacttgcatttgcttacttagccaagaaatggtgaaaaagtcctagttagattctaaaatgcagtctgtacaaatagatatgtcgttcttgttcatgctgtatattaatatgtaaaacaatgccttccacataatagatgccattaaccaccaaaagaaaaaaatgaatgaatgaatgtgttcttcatatttattctcctacaatttcgggatgctgttttttctattaatgtaactccagctagtgggagatatgaagagcctaggaaatagaaaagaaggaaacagctggaactcacaggcaggtcaggggactctaatcatctttcattttatacacacaagattaaagagtccctctgagttttgattaaggatgcacagttataagattaaataccagtgagccaaattagaaaagctttaactccagtctcaggattcatcaaaactcttcctgctaccccctccctcacattaagccatctttacaacatgggattagagcaaactatttaagacttcatgtccccaggctctttgtcacctttgctgtacagctgtcctcattctgatcacaaacaattctctcatcaagaatcaaagctcatttccccttgaaatttctgtttatatccatgactgaattcattccagcacctctacacgtatttatttattttggcgacctgcagggtcctatatcaggtacaacatgcactcttgtcttatgcattgtcatgaaacatattaaaacttagtatgcttgtctgttttagaaaagacctctttaatcattccagtaattatgcaaacactcccacagggccaacaataaacatgtccttcccttcctgagaagccttctgactgtctccttggaagccacaccaaagggattggacagaacgtgcaattaataactcaaatgaggagaggttaatatggtcatcaggcatctgagaaataaaagtgtcattgctttattaaaagctgtaattcaggtacaagcttacatagtaatgataagacaattttaaagaaataaatgaaaggaccagaagaaaaaaaaatgttgatcttaactctagatgagattttagattctgcaaacatattttcttggttgataaagaatgagatccattgacctttaaatgtattatttgttgcaagaaaatgtagaagtccaaggaaactctacagggactttgctacttgaggtttgataacctgtccatgagtttcctaagtacagtgaattttcgagggtccgttttcatgtggcctcaggagatcaaatttaatcatttaggttttcctttctcctacttgggaggggtgtaggggcttgagaagctcagggctatttaaaaagacctacatgggccagacgtggtggctcatgcctgtagtctcagcactttgggaggatgagtggggagaatcacttgagcccaggagtttgagaccaatctaggcaatatagggagaccactgtctgtatgtgtgtatatatatatatatatatatatatatatatatatatatatatatataaattagtcatatgtggtgtcacacacctgtcatccaagctactcaggaggctgaggctggaggatctcttgagcccaggaatttgaggcttcattgaaccttgatcaagccactgccccagcctgggcaacagaacaagaccctgtctcaataaagtaaaataaaatggcctatactatctttttgttgttgttgttgcctcacttagtatcaaagaagattaagagaaatgtaaagagctagactttgagctcctatgtaataaggtccaggtatatgaaagagaataatgatgaggccctgatgtacatcccataacgtgagaaatgacagttagaagaacagggggactctgtttagtggtaacatgaactctttaaggaactctttaaggaagctgggacaagggagagccttcaatttctcatacacagaagccaatatgggctgtttatggttgaatgaggaggaggatggtttgggttccttgacctatgtcactgaggtacaatctttatttcaaaccctcccaggccacgatgaaaagactcctggaaaaccatgaggtggccctcccaaaccctaagattggaatgtggttttcctagggaaagaagactcatgagctgtctggaggtgagcattggtggggaaggtcttttggagcaagaagaaaaccgtgggctttatcctttaggctacggagtcattggagaattttggacagaggaataatgagatagaagtaatgtctagagaatattaatttgataacagggtacaaaataatttaggagatttctgggaagggggccagttcagaatcttcttccccccataatctgtacgtgagaacatgaagtgctgttggtttattgagtgagctaaactgagcgggggtagaactagggaacgatttaatttttcatcgtctattgcatttaaatgtggtctgtttgatcccttttccttatccctgaatgagatctgaggaaaatcacatagctttcttgtccttttgacttgttagacaagtcctattttgttaagagtcactgtgtctggtattaaacagcccagtctaaataaaaacttcaggctcagatccaattctgagcttctcaccttccctcaactcaggtctgatctaggctaggaaagaggtgtggtcttttcttatgcaattcctttctcctttgcttctcttcccaactcctgctgctggctcctccagaactgggaagcaggggttagcatgaaagggggaaaggcatttttactccgttcatgatatttatgggtttctcttggctggtgataatatgtgtgctgggcctccaaacgctggctcatttgtggggtgcagatggtctgtgtgtgctccacgtgggctctgcacagggtgtcaagagatgcaatacccagttggccttttccaagcctccggtggtaccgtctagtgtgctgcatcccatcgagatggctcaagcttggctcccttccggagttcaccgaacccaccggaaatgcatggttcgttgccgttccaaatgtgggctgcttccggtgctcctttccttcctcctgccagcctctcactgtctacattctctggcgggaggcaggcaccagcctctatgttcatataaacccctaaattctagcttatccatgtcatgctctccagagagcaattccaccgtatccttctttagggacttaagaattgctgcaactgcttagcaagcccccagctgagcgtgagatactgttatgggttgaactgtgtttccccaaaattcatatgttgaattcctaacccttagtacctcagcaggtgactgtatttggagatagggtctgttaaaagaaaaaagtgattaaattaaaatgagcttattagggtaggacctaatccatgtgattggtacgcctctaagaacaggatattgggtccctgggaagaccaagtgaagacacagggagaagaggaatacctgccaggcaaggagagaggtctcaggagaaacaaaccctgctagtctcccgatctcggacttctagcttccggaattgtgagaaaatacatttctgttgcttaaaccacctagtttgtgctattttttttatggtatccctggtaaactgatacagatactattttctattctgtatgggcaccctcatttccacaaattgggaagtgtccgctggtttcttggtttcatgcttcgtgacgcttattgtactcagcttggagcttcacctgaaaatccgagaccagaggagacattctactccgtcatttcttctttttcttcccttttttttttttttttttttttaagatggagtctttctctgtcgcccaggctggagtgcggtggcgccatctcggctcactgtaacctctgcctccccagttcaagtgattctcctgcctcagcctctgtagtagctgggattacaggtgcgcaccaccatgccaggctaatttttgtatttttagtagagacggggtttcaccattttggccgggctggtcttgaactcctggcctcaggtgatccgcccacctcggccccccaaagtgttgggattacaggcgtgagccactgcacttggctccatagtttcttttaaccagcttacataaagatgtgagtgcaaaaacttgtgatttaccatgactgttgccatatgtcctcagtctcctcattccaggacagctgccccacaagccactgccagggtctttcaccaagtttgtgccagggcatctctctaagttgctttctccaaaactgcaggagcctgcttaacgtttttcatgcatgacacagaatttcaggggagttaacaccctcggaagcaaccctcaactaaagtgagtaatacctccacaccccatcacctggtgtgacagttctaaggagtgttctgcacagcttctcacaggttaatccagttcattagacaccagttattgatgttttctcttttttgtctcactgtttctattccattcttctgttttcaacgttaactcctgaataaactatttgcaccaagacttcatgtcagagtttgcttcttagggaacctaaactaaaacaagttgtgctttataacttttgcagtgaggttcgatcagcgtctacttctgagtttttcttggttctatgtgtagttttttgctcattgatttttgtccccgatttaatcaaacatgtgtatatgatgcaaagctaagtaagacgtggcccctactctcaaagcgtttacagtctgaggagtttaaacccatagaagtgtattgtcacagacactgaaagattctttgagattcttctgtaactcttgaaatgtgaagaaggaaagaagacaagggcagtacagggttctttgaacagtgggattgtgggtaatttgacattgccttctccccttcagctctgacactgcaaacacgcaactcctgtacatccctctttctgctgttttcaccatgtgctgaatgccaccagccattcgaattaactattgcattccagctaggatctctgaggcaatgtcctcatagttatcacactggatagaattccaggtggaatctctgagaaaatatcctaatggttattgcgttggatagaatgtcatgatttcatgattgttttgctttgaaaacaaaaacttttaatctgcataagagcaggctcagggaggtgacaaagctgttgcctaatatgcagagagtgatgtatggttgagagcagagacttcaaattttggccctgctactcactgggtttgtggtcttaggctggttacttaacttctctgaacttgaatttatcctgtaaaatggaacaaaatattaatacctgctgattgaggctgttaggtggatcaaatgaggagtgcctatagagtttttagcagagtgtccagtacatgaataaaggaccaagacattaataagcatggggatgataatgatgatgcaaagaaatttagtgttttctgtgtggtctcagaaggtggagacagacctggtgtttgggtgaatagaactagctgagattggaatacttcccatgtggtgggtccccagcagagcttggcatcacttctctctcttagtcaggatattagaagggatttaagagaggggcgggattttcaaaagaagacatttatgtggccaaaaagcatatgaaaaaagatcatcatcactggtcattagagaaatgcaaatcaaaactgcaatgagataccatgtcacgccagttaggatggtgatcattaaaaagccaggaaacatgctggagaggatgtagagaaataggaacacttttacactgttggtgggggtgtaaattagttcaatcattgtggaagacagagtggcgattcctcaaggatctagaactagaaataccatttgacccagccatcccattactgggtatatacccaaaggattataaatcatgctactataaagacacatgcacgcatatgtttactgcagcactattcacaatagcaaagacttggagccaacccaaatgcccatcaatgttagactggataaagaaaatgtggcacatatataccatgcaaaactatgcagccataaaaaagaatgagttagcgtcctttgcagggacatggatgaagctggaaaccatcattctcagcaaactaacacaggaacagaaaaccaaaaacttcatgttctcactcataagtgggagttgaacaatgagaacatataggcacagggaggggaacatcatatagatgatgggttgatgggtgcagcaaaccactatggcacatgtatacctatgtaacaaacctgcacattctgcacatgtatcttagaacttaaagtataattaaaaaaaaaagaacttaaagtataataataatactaaaaaaaagaaattgtggtatatatataccatggaatactactcagccataaaaaggaacaaactaatggcatttgcagcagcctggatggaactgaagactattcttctgagggaagtcactcaggaatggaaaaccaaatattgtatattctcactcataagtgagagttaagctatgaggatacaaaggcataagaatgataaaaaagacttggggactcaggggaaaggctgggaggggcgtgagggataaaagacttcaaattgggttcagtgtatactactctgttgatgggtgcactaaaatctcacaaattactgctgaagaacttattcatgtaaccaaagaccacctgttccccaaaaacctatggaaataaaaaaatttttaaaaaggaattccgactcgtttccctgccctaaaaatcctctgaactctcccttttcatgtttccctctccaataacctatgccaatctctgatctttgtctccatatttgcttttcagaatgtcatatggttggaatgtcatatggtaagtcatcttttcagactggcttctttcacttagtcatatgcatttgagattcctctttgtcttttcgtggcacaatagctcatttcttattggtgttgaatcttattctactgtttgtatgtaccaaagtgtaataactcctacgcctactaaagggcttctcagttgcttcccagttttgacaactttccatcaagctgctatgaatatctatgtccacattttttatggaaataaaattttaactaatttgggtcaaagtcaaggagcacacttactggaatttatagtgacaatatgctcactttagtaataacctgccatactgtcttccaaattgttgtaccattgacattcccaccagtcaatgaatgacagttcctattgctcctcaacttgccagcatttggagttgtcagtataggatctttttttaaaaggaaaagaagaaaaaaaagaaatgaactaaatgaaggagctagcatgagacgtcattgattagaataatttatttgagtcaaaaagtgaaatgcagggagcagcaaatacaggaatcaatctgtacccacatccagcccacctcacatgtcaccactaccagatgtatggatagagacaaccactttgttacttcacaactcacacaccatcagtgcctgagtcagaccttctggctttcaaactgtgcaactgtaggcaggtttcttattttctataagtctgtaagtcagttgcctcaactataatattggaaatgtaatagcttatatcttatactttggtaacaaggatgtgaatataataacttgtgttttgcaggtatggacatacaaactgaaaaaaaaaagagaggggtaggaagagaggacccttaagataactacgagccacagggtctaccacttcactccagggatgatgagaggcattaagtgaagaagggatgtgactcagtagctttgaaaaattcagaacactcagttgacctctgatagcaagggtgtagcactggcctaaatggcaccaagaacttgggtgtctctgggatgtagcagtgctggccagaggaggtcagctctaaaataacctgacatggaagggtttcctggtatgaccctgaacttgaccattgctcaactgtgagcactctgggagcaggattcgagtctgtgtctatctgtcctttttctctacaccatgctgcctgtaactgtgtgtatatttgttttatccttccaactaaggtattcatatttacatctgtttctatttctatgatacaacaatgggcagaattttcttttcttttttttttttttttttgagatggagtcttgctctgttgcccaggctggagtgcagtggcccaatctctgctcactgcaagctccacctcccaggttcagcccattctccttcctcagcctcctgagtagctgggactacaggtgcccgccccacgcctggctaattttttgtatttttagtagagacggggtttcaccgagttagtcaggatggtctcgatctcctgacctcgtgatccgtccacctcggcctcccaaagtgctgggattacaggcatgagccagtgcgcccggtccagaattttcttttgaatgtcagttggttttagggaatttttccttatttgtacttttttgtgtatttttctcttctggattcctgttactcaagtttaaaataaatgagatgaaactaaacatttatttgaatttcaactctgtattatatttcttttaattgtttagcctatcttgaaattataattgggatggtgtttgttttacgacttaaaacaattcaggattatttcagtcaaaaatatgaaatcaatgcctttttgatgaatagaggctttacatctgaataataaataggctgttctttgttttcataaacagctggggaaaattataaaccccagttatctcctgtcattaaactcatcctggagatgtgggaagtctactttagaaatatttacaaaaagtaagttcacaaatgcaagttatccaaagagaaaacattaagtgttaaatataaagggtaggaataacttgttatatatgaacagcaaggatgttcacagggagagaatagataggtagccaggagcacagcttcataatgatgaaacataaggcacttcaataaagacctgaacatttatgtttatcttaggttaatttgccagttagcacacagtcagtcttcttctagaggcattaatgaatgatttacattaagcacaataaagagcacctgctttctgactgttaccttgttgaggcagggaaatacatcccaagtaaatcaacaccattgctttggtagctataaaattagtctatctgatttaaatgttatagtcatggtatttggtagtcttgttaattttggacttgtattagctaagaaaaaatacgcctcacacaagtagagcccttataaacaaagtaagattctccttggtttttatgtgaaggaactagttgattctcctgggtgattactttcacttctgcaatttcctttcagaaatgagttctggttcattgatttttagcagagcatatataacttactgtttttaaaaggactatccttctagtggagcacaaggaaacagaattttaaggggtgatcataaaattaatatatgctcattgtagacgttatataaagcacagacaagaaacagaatttaaattctgctctctaggtacaatcactaatatatcagtaggggtgtttttctttctagcactttttggaggtggtatataagtatgcatagtttttctgcatatattgttaatatattgcttaggtttaaaacataattttttcaacattttcttatgttattaaatattcttttaaaagtttttatacttgaaataattatttattcacaaatagtagagagaagtttcatgtctctcccagttgtaacatcttatataactatagtacagtgttacccattttctcccaatggtaacatcttatataactatagcacaataccaaagtcaggaaattgccgtcagtacaatatgtgtcattttattacatatatagatttgtgtgaccacatcatagtcaagacacagaactattccattaccataaacatctcatgcatgctaactctttatacccttatggttactctatccaccaccactcctggtaaccactaattttgttctccatctctctattattgctttgagaatgttatataaatgcaatcatacagtacttgacctttagagattggattttttactcagcataatacctctgagagccatcaatattctatgacatgtaccgcggtttcaccattcctccattggaggacatctcagtggtttctggacctttgctattaccaaataaagctgctgtgaacattgtgtacaggtgttttgtgggcagaagttttcatttctctgggatacattctcagaaatgtgatttttggttcatatggtaaatacatgtttagtcgtttatttttttatttattttttttttgaaagaacaaaactgtagatttttctctttttttctttttttttctttttttatttatttttctttttttttattatactttaagttttagggtacatgtgcacattgtgcaggttagttacatatgtatacatgtgccatgctggtgcactgcacccactaactcgtcatctagcattaggtatatctcccaatgctatccctcccccctccccccaccccaccacagtccccagagtgtgatattccccttcctgtgtccatgtgatctcattgttcaattcccacctatgagtgagaatatgcggtgtttggttttttgttcttgcgatagtttactgagaatgatgatttccagtttcatccatgtccctacaaaggacatgaactcatcattttttatggctgcatagtattccatggtgtatatgtgacacattttcttgatccagtctatcattgttggacatttgggttggttccaagtctttgctattgtgaataatgccgcaataaacatacgtgtgcatgtgtctttatagcagcatgatttatagtcatttgggtatatacccagtaatgggatggctgggtcaaatggtatttctagttctagatccctgaggaatcgccacactgacttccacaatggttgaactagtttacggtcccaccaacagtgtaaaagtgttcctatttgtccacatcctctccagcacctgttgtttcctgactttttaatgattgccattctaactggtgtgagatgatatctcatagtggttttgatttgcatttctctgatggccagtgatcatgagcattttttcatgtgttttttggctgcataaatgtcttcttttgagaagtgtctgttcatgtccttcgcccactttttgatggggttatttgtttttttcttgtaaatttgtttgagttcattgtagattctggatattagccctttgtcagatgagtaggttgcgaaaattttctcccatgttgtaggttgcctgttcactctgatggtagtttcttttgctgtgcagaagctctttagtttaattagatcccatttgtcaattttggcttttgttgccattgcttttggtgttttggacatgaagtccttgcccatgcctatgtcctgaatggaaatgcctaggttttcttctagggtttttatggttttaggtctaacgtttaaatctttaatccatcttgaattgatttttgtataaggtgtaaggaagagaattttagaccaatatccttgatgaacattgatgcaaaaatcctcaataaaatactggcaaactgaatccagcagcacatcaaaaagcttatccaccatgatcaagtgggcttcatccctgggatgcaaggctggttcaatatacgcaaatcaataaatgtaatccagcatataaacagagccaaagacaaaaaccacatgattatctcaatagatgcagaaaaagcctttgacaaaattcaacaacccttcatgctaaaaactctcaataaattaggtattgatgggacgtatttcaaaataataagagctatctatgacaaacccacagccaatatcatactgaatgggcaaaaactggaagcattccctttgaaaactggcacaagacagggatgccctctctcactgctcctattcaacatagtgttggaagttctggccagggcaatcaggaaggagaaggaaataaagggtattcaattaggaaaagaggaagtcaaattgtccctgtttgcagacgacatgattgtttatctagaaaaccccatcgtctcagcccaaaatctccttaagctgataagcaacttcagcaaagtctcaggatacaaaatcaatgtacaaaaatcacaagcattcttatacaccaacaacagacaaacagagagccaaatcatgagtgaactcccattcacaattgcttcaaagagaataaaatacctaggaatccaacttacaagggatgtgaaggacctcttcaaggagaactacaaaccactgctcaaggaaataaaagaggatacaaacaaatggaagaacattccatgctcatgggtaggaagaatcaatatcgtgaaaatggccatactgcccaaggtaatttacagatttaatgccatccccattaagctaccaatgactttcttcacagaattggaaaaaactactttaaagttcatatggaaccaaaaaagagcccgcatcgccaagtcaatcctaagccaaaagaacaaagctggaggcatcacactacctgacttcaaactatactacaaggctacagtaaccaaaacagcatggtactggtaccaaaacagagatatagatcaatggaacagaacagagccctcagaaataacgccgcatacctacaactatctgatctttgacaaacctgagaaaaacaagcaatggggaaaggattccctatttaataaatggtgctgggaaaactggctagccatatgtagttgtttattttttaaagaataagaaactgacaagtctaaaaaactgcccagttacatggtttaaaagtagctctctcattttgcattcctgccaccaaggtatgacagttctagtttctccacatccttaccagcatttggtggtgttactattttttatttttattgttctgataggggtgtattgacatctctacatctcttcttggccttataaatattctttgaaaatgttttttaatagctggtgctatctactactagactttatttgaaacctaaataggtgagtttttaaactaccaccataaccaataacagttattacctgttgaatgacctttcaacaattctgttttcactgtactcacttactgagctttatgaactggccagggaaaatagcttacaggttgtctctttatttaaaataagtcattcatattttgcccttgtcttatccactctctcataggcttgcagagagagagagagagagagagagagagagggatttaattaaaaatgagtacatctgaggctcctgctcagagatcccagctgaagtggctgtgttgatttttcctggtgttatgtcatcggaaggcattttaaagcccaggtattgtatcaacataaatgttcttcattgccttgcacaatgagttcttgtaatcattcatcagagggtgactgaggagtctgcctctgcccttcaagaagccacagctcattgtctgcacttcctttcattgccaactggggagagcttcagaaaggaggaacataagcattgggatgcacgaggaggtgggtttatgtaggtgattaatgcagttccataaaaagagcttctctaggagaacaaagtgctacttcatttgtgggaagacaagattgaagaagagctctctttaatgcactagtcaggagcagatgaatagatatattgcaaaactcccttcctaggaagaaacaagtccccccaaacctgagagataatggcatgtcagtcaattttaaaatggacattagaccttaagagaatgtgaaacccattaagctgtaggggttgcaaaagaaggggcacataattagagcataagtctcctggctgtgacagcatgaggtcttgggaagatggattcaccagcctggtgctgaactccacagctgggctgagcaggttcacctcctgttgctgtcaccacagataatcctcctgggatacaaggtcttaatgtatgccttcaccaagactaccttccagacttaataaccccataaatccctgggagatgttcattctaattgactacttaggaacagcatttattgatgacgagctaaattttcagaaatcaattgctaattagtgacacagccaagataatgatataaacaatgtctaggttgcaggaaaagctatgaaaaaaagataaaagctaacagatgattaaaaaaaaaaaacaactaaaagttaaataagaccagaatgaaaagcaagtcaactataggaaaagtccttaggcaggaaagtagcaggcctgatgtcttgttctaacgtcagcatgagctgtgtgaccctatctagctgtctttacctgctccaagttaaaagtttacttacacaaaaacaagtgacctaggagagactaatgggggctcattcattttttaagaattaatagactttaatttttagaggggttttaggcttacaaaaattgagcgtatagtatagaattaccacatgcttcctctatccttgcctcagttccccctattattagcatctggctttggagtgctacttttgttacaattgataaactaatattaatacatgattattaactaaaacccatactttacattagggttcactccttgtacaattctgtaggttttgtcaaatatatcatcatatgtatccaccatatccaccagaatagtttcactgctctaaagaggccctgtactccatctattctttccttcctctctctccccaagttcctggcaaccattgatctttttgctgtctccatagttttgtcattttcagtgtcatacactggaaatcaaacagtagtaggtagcctttttggactggcttctttcacttagcaaaatacatttaagtttccttcagggtttttcatctagcatgatagatacatttttataattaatttattcaatcattagttattagacgcatgtctgcttcaagtactggctgggcccagagacataaagacaagcaagaaattgctttacttgtatgaatttcacatgggaaccagtggagagacagatgattgaacagtggcagtgccctgcagagaggaaaaaatgagagtagaaggtgaagacagtgcactgtgttagatgatgtctcagggaagctggacagggggtcctagtatgtgtagaggaggaggcaaactctgaactggaccagcttcccattttaccagccaggaaaaaggaagaaagtgtgggagaaaactccatcggtgtaaaaattaatacattaaaggaagtgagaaagttaaaatagaagataataaggaagaacatatttttagttgtaatggttctgaatgaatacctgatatgagtgttttctattatttcctcttacaaaatagaagaatctttgctggtgcctgaaacaaaattaattcattttccttgaataacctaagtttaaatatgggtcttttttttttccattgagaatcatagcattttacaacaggaaggaaacttaatggaaatttagtttaacttatttattttacagatgaggaaactaatggctaaaaattgcttttcccagctatttaagaaatggaagtatttttagtagagatggggttttgccatgttggccagggtgatccgcccacctcggctgacagagcgagactcatctcaaaaaaaaaaaaaaaaaaaaaaaaaaagaagaaacagaagtgtgggggtggaaagtagggctctttattctgattccagtggtcttactcttacagactttctaaagacacagaataaacaatgcaattatccaatagcaggttctaaaacatgggtaaaaagaagagagaatgacaggtaatcctgtttcttacccaaataagaggccagtccagaaagtttgaatatcccagatgtggctgacctaaggaactgtgaataaaaggatagataagaacattcgaagtggggagggaagacagaaatggaaagaaggtaagaaaaaatcagaggggaggcaatgagagaataatctaaagacacttgtggcattagatatgtcattttattttattttatttttactttattttattttattttattttattttattttattttattttattttattttattttttgagatggagttttgctcttgttgcccaggctggagtgcaatggcgctatcttggctcactgcaacctctacctcccaggttcaagcaattctcctgcctcagccgcctgagtagcgggattataggcacgtgccaccacgcccaactcatttttgtatttttagtagagatgcggttttgccatgttggccaggttggtctcgaactcctgacctcaggtgatctgcccaccttggcctcccaaagcgctgggattacaggcgtgagccactgcgcctggcctggatacgccactttgaagagaatgttgccaagtctgtgggattaaaaaaaaaaagaaaaaaataacaacaaatgactgttggtcaacttggaaattccagacatctagaaataacattaattcaaggagagaaatcaaattcctgtcattatcttctgagaatatctcaagtaggaggccctgattctgaggtcaatacactcttatagatttccccagtttggttcctgtttctccaattttccatgttgcttttcttcgtggttcgagggtgtttggatgtttcactgggagagatgctggcaagcttacttgcttcgccaggcctgctatgcatcctgtgggatagctctcctgggaggctgtgtgtgagcacaaacaagggctggaggaggttaaaatctgttgttctcttctcccttctcttctcttctcttcttttctctctttcctccttccatttctgcttccttttctctcttctcctctctttctctgtcttttaaccatggaataagattttctgcgtccttctcacactgcctaatatgactaaaactctttcttgttgattaatggtttaaattgctttctatctttcacccttctcccctccagacaaagaggtttttgtcgattccggggatgggaaatggtggggtataggtgacggtaacggaaaaaagaacttttatttatttttttgagacaggatctcactctgtcacccagactggagtacagtggcacgctctcagctcactgcagcctcctcctcctgggctcaatcaatcctcccacctcagcctcctgagtagctgggatgtgcaccaccaaacctggctaatttttattatttttgtagacacggagttttgccatgttgcccaggttggtcttgaactactgggctcaagcaactgtccaccgcgttctcccaaagtactgggatcacaggagtgagctgccatcctcagtcaaaaaacttttttcttttcttttcttctttttttttttttagatggagtcttactctgtggctggagtgcaatggtgggatatcggctcactgcaacctccgcctcctgggttcaagtgattctcctgcctcagccttctgagtagctgggattacaggcacctggcatcatgcctggctaatttttgtatttttgtggagatggggtttcaccatgttggccaggctggtcttgaactcctgacctcaggggatctgcccacctcggcctctcaaagtgctggaattataggggtgcgccaccacacccagtctcagccaagaaacttttaagaagctaaaatgtgatcccctatttctctgtgtttgttgggatgacaacatggaacatggttcaggcaatgctcctgctcagcagcctgaatgaggagaggtatgaggggcagttttagggagaattacaagttaacacttcacaatatcgtctcagtatgtacacatcattctcagtttctgaaggaaagggtaacttttcagagctgcacttcacacttttttttccaaatacattgccgattccaattttgcccagagattagaactcctttgtctactgagtttactaatgtgctcaagccttttcgtttgaacatactgaaatctcctttttttcagaccttaaattctaaagatatttgtatttgttagaaactctcaagcagagtctgatggaatgatacggcaagggaatggaggcaaaggcagggtttgaagaaaataaaagcggatgtgaagtccacatcagtgctataagagcatgagaaattgtggccagcccagactgaaagggtcatggccggcggagacgacattttaaatgatccaggaaggatgaatgggagtagcataatctggtgtcatgctgaggaagcatagccacctgtagtatgcagcataggagcatcgaggtaagtccaggatggctccgggtagttatagttttgggtggctgattagcttataggctttcttcctctttagagtgaaaggtgaacggtatctgagttattggtgacgaatctgtacgtgtctacagcgacctcaatacctgccttctcattagaaagaattcaaccgaggggcgtaagagagaaaaagagacgggcaagtttcagaggaggagtggaagtttatgtaaaaaggctttagaacaggaaagaaaggaaaatactttaggaagagactcaagtgggcactgaggtcaagtgcagtatttaaccttgatcttaggactttttaggctggtcccttgcccatggttcttcccttagggtgggccgcccccatgtgcagtgccttccttatgctcagaggtgagcacgcggtagtgtgtttaggaagttgtgtgcatgcccatctgaggctttcttcccttttccggtggagtgtccccggaaggtcatactccgccattttgtcgcttaatgtgcatgcccaggcttacttgccctatacctgagattttattggaagcccctttttgcttctccctggaacctgcattcaactaacactttaatgcaacaggtgtggaccatcaggaaatggcctcttcctggcactggctgccaattgatcacttttagagaggcaatgtgataattgcacaaccatcatccgatattcccagtgggtaggggagagccctctcttgccccgctcatgcctgtctaactccctgtaacagttttgacccatggatgaaaagttttcatggttgtgttcctactctgtgaccctgtcaagttatagtgatgaatccctgacttaggctaagcccgtctagtttcaaatatctgaaatttcatagtttgagttgagacgaagtaactattgggagatgaaaactgagttgctagtggctgtgctctagaaggaagttttataaacattggggctggtgctggggctgcctgttcacctacattccaacgtgttaaacttgctaagttggtggtagatgccagtattctcctaattaattcatttttgatggttgtttttacaaacaatttccaggtttttttttaataccttaactcattaactgtccacaaatctgtcattcaaaattagcccatgtgttcccagtactgtgattttctcagattaagaaagtagttctcaaactttagatgacatcagacttgcctggagggtttgttaaaacacagattgctggaacccctgcccctcaccccctgcagagattcatctgattcatcaagtcttgggtggggcatgaaaatttaaatttttatctttaataagtttttaatgcttatgttgctggtcagagaaccacaatatcagaaatactgatttatgcagtaataacttttgaagaattctgtaaaaataaaaatacattatgatatgtattacacttaagtgtttatgttcgtatggcgtaaaagtccaatctcaagacctttaacaccttagcataaatgggataatattcatttctaatgggaagtttattgatttgggtacagttgtggtgatcatatgccacaaattatcctgggtataccaatttcaagtaattttttccttccaataaatttgggccatcatatgcataaacagaatttaatatctatactctgataagatagttcatttaaacatgttcacagaacaataaaagacatctatccttaggtcacaggtcctagctttttgtttaccaaggaatatcatcactgtggcatacaaagaaaatttgagtgaaggaagagagaaagggaagtccaaagcaggggtcaccagaaagatgttcccagcgggcttgtgtgtgttatagtacgaaggtgtgtcacttagcatttgcccagagaagtaggaccagtagggagtaatgacctccaccacacagtacaaaattgttgtctgcaggtggaattccgtctctccaggaaggctcgggcctgctttccaactgattaagccaggcccacccaggttgtccaggataatctcccttaattaaagtcaactgaacagggactttaaatctgcaaaatcctttcaaagcaacaagtagattagtgtttgaatacctggggactacagcttagctgggttgacatcaaaaaagccattacagagggtatgagctatactcagagggagggtgccaaaaagggtaaaagaatggttctgagggccaggagcaccaatcttctcttattttcagttttggaaactggatatactctgtattcagcaattgccttgtaatagacttcaagagtgagaaaaaagaatcccttaataatagtttctgcaaatgtgtgaaagctgagtgtgaggagaaaaagttgttttcaggaactaggagctggttcacctttaaaaagaaaatcagctgcctctggcaaaatggaattgcagcattgtcctggatggtaatttgcactagtaaatttatcaccaacctggcaggggagatgctgaagacaaaagcttttatctctcagtaagtcagtaatgaagcctcagacaggcagctgaggaatgtgcgcgcttggttggcaaagtcgtctgccctttggtctctgagcacatggcaagagttggacaggtggtcgcagttaattttggcgtatcgtaaaaatgactatgggtcccagggaggttccacgggctattaattaaaaattcagccttaatgtaaaattccatgattgccaaggaatcagtcacttagcgatatcaggtaaattcctgtgcaaggaaataatatctcagtactcccaattcactaagccaaaaaggaaaagttaagttgagtcatgcagaacacacacacacacacacacacacacacacacacacacacacacacaaacaacaacaacaacaacaacaatagcaaactacctttgcttgagttcctaaacaaatagttatagggtagaaggccacatgtctcttcagggggcttctctcactctgacaatgtaagtgaacagcttatcttcacagtatggtacaagaggagactggaaatcattcctatccaccctgagatgaatgcatatttgacttcctcctctactctatgtttactttatcttatgtaaagtgcagatttactgaatgtgagatgaatacctaattgactattccctctaccccctcctttccatgtgagtattcagtgagcctaatcaaagcatcacaagaatgtgactgtatcctccctctttttctctccccttttcccacggcccacttttttcactttaaatattgaagctctcaaagtcctctttggaaaaaatatgggccacagatccttctgggacttgtgtctctctttcctggatgcatccttaactttggcaaaataaacctctaaattgattgagactcacttcagttattttgttcggtgttacagtcctaagaacttggaacacaatctaatttttgtctcagagagtcagaaattaatgccacattcatggcagctggagtgggtaattgtgtgtttgatgagatcccactgtgagagcctaccacggagctgagtggttaacagataaatgctattattgaaggacaggagaaatgccgcttacataaagtatacctttcagacgaaaactacctgagaaggggtggagtccacatgaaaacctcaaattatagcacacatgaaagaaaataatccagcagttagaggaatggaaaagtagcactgccttagctcctctttcaaagcctttccctttttggtcccgtgtattatcgtctcctaacaccattttgatgtcctgtggatatccaaaggtttctctccaaatctcacctctctggtttttggtctgccattgatcctttccctgccaaccttattcttttaaaatttacctctcctaggaataatactcttggaaatctgtttccaattctctgatttctgaaagatactgtgataatcatgttgatgctgactgtggaattcactcagtggtagatcctagactatagtatcactgtaatcccagcagtttgggaggccaagttaggcagatcacctgaggtcaggagctcaagatcagcctgaccaacatggtgaaaccccgtctctattaaaaatataaaaattaaccaggcatggtggcaggtgcctgtaatcccagctacttgggagattgaggcaggagaattgcttgaacctgggaggcggaggttgcagtgagccgagatcatgccactgcactctagtctgagtgacagagagaatcagtctcaaaacaaaacaaaacaaaaaggaatataatatcaagttcctcctggtttgatatggaaatttagctgtccttctttcctgcagaagaaggatgggatgcagataccttgctccatttcctgaaaaagagaactgattgtttggctgcttgtgatggcctttgatgggcatcctagaatggatgaatagtcattgttgttatttttgcctatctgagcatcattcccattgcatttataacttgggggtagcttaaaggtctattttccaatattgtaaaaaataatattaaaaccaatgctcaagaaagttatgtgagtttcccagtagcagacaatcttgagggtttttaatatgtatcactcagaagtatgaaaaatcaacagaaatgaatagctccttgtgggcttccaggcattggggcacatgtctagggatttttaatagctctgggtcctttctgttacactgtaaatccataaacatgcaactacctatctgtgcctcaataaacttgttattttggtcattacaaagaggcattacactaatgcaggaatagaaaaatagaatgcatgtagttcaacatatggcatctctgaattttatcactttttgaattaaccaagtgttaagcatttaattgatgccctaggtcaatggaattctactgaactgtatgatcttggataagtcacttaatttctcttctgagtgttgggttagttatacaattgacaggttaaattagatcatcttttagcactaaggttttatgatcttccatctatatcccatagatgatatgacatctatgggaaatacgatctaagttagatggttcatcattgctggggaaatacaaaaccaacaatgattctgacagaatgattagcatccctgaaagatcgattataccaagacttatttatccacaagcgagggattgtttagttactctggacaattatggttgttatcttcaagtggtcttatcacagacagaactgcagcttttggtcttttctaagagatttaaatcattttaatggggcttataattccacatcaaatcatgactaacaataagataaagttcagaggcttaaaaattgccgtaagagcagagaaataatctgtagcaaatccacaagttaatgagatgcctgatgtgggagtgtgcattttctaagaaaaaccattcctctgaaagatactgatcccagacttcagagaaatgatgagggccttggaactttcctgcaggctaatctgccagagaaccagtttgccaatccctcggatatttgctcctgcttgtttcttttccaattgcagttgtttacattcctctgcccggctacctcctcacattcctcttatatatatatttttcttagcttcctccttccctgctgtatttgaggcatgcctaacaactctctttcattgttatttatttatattgctaagaactatgggaaaacacatagattgacgaaagtaacagatctcagagaatgaatctcaaaatatactcaagtaattgatatggtttggctgtgtccccatccaaatctcaccttgaattgtagctcccataattcccacgtgttgtgggaggaacctaatcagagttaattgaatcataggggtgatttcccccatgctgttcttgaagtagtgaataagtctcacgagatctgaatgttttataaggggaaatccctttcacttggttttcattctctctcgtctgccaccatgaaagatgtgcgtttcacgttccactatgattgtgaggcctccccagctgcatggaactgtgagtcccttaaacctctttttctttataaattaaccagtctcgggtatgtctttatcagcagtgtggaaacagactaatacagcgattgtctctagaattcactgaattgtaaacaaggctacatatacattctggtagcgtcctttctagattccttccatggctgttccctacttcttttgttagtgttttcttttttttccctctagttctgtctatgttgggcacttgctggggatgcttagaagtcagcctaaggtccagtaggtctggtcctgttgtccctggactgtgctggtcttgtcttcctgttttttattgttctagcacccctttactaacctttaggctaatgtttaaattgaccttagtctaaatggcatgttcaaaggcgaagtggcctttatgatgtgatcatccttggattaatttttaggttattatttcctctctcagccttgatccttggggatgccaattttatttgctggttctgctaccggtggagggtgtccaggttctcggtgtcttgaacataaattggacaaaacgtacaaagaaagaaagaatgaagcaactaaagcagagatttattgaaatcagaaacatactccacaaggtaggagtgggccgagcatacggctcaagggcctggttacagaattttctggagtttaaattctctctagaggtttccattggttacttagtgtaccatcctatgcagatgaagaggctaaagtgaagttacaaagttatttacttggtgtacaccctatgcaaagtggatgtgtacaccctatgcaaagtggatgtgtacaccctatgcaaagtggatgtgtacaccctatgcaaagaagaggatgtttcctgtcatagctgaagtagagttacaaagttatttacttggacttagaaggctgggttggggtttttccatttaatttagttctaggaagtccttaggttccctgcctccagaccctatttcctgcctcagttcctagttccaatccttggttctggttaaaagttttctacaggccacctgaattttagacgaaaggttctttctagcgatgtggtggtaaatgtttaacaacttgcttttagaaaaaaaagaaaaacctgatttgtagcatttgccaatttctctcgtgtaaatactaccactatggtcaatttcaaatccccagtgtgatgccatggaactcagaattggaatggaatgaacgtaactgactctcactagctggctctatcacccccttagtcagttctctaactcatttgtggaatggagaaagcaacttaattctttcttaatttttgcattttgtcattccccacccctccccccaccatccctggaagacacaccaggctgatctcatagttcttctggtgatttttagtattaaaatattcactaaagtctaatacaattgtttattcaagttaaaacttcttccctattccagtttgtacttgacctcatctgtaagcctactgttgagcagaaaaacatgtaccagttaccaatgccaggtgaagattccaactatctggaggatagacaaggtcatcataatgccagccacctgtaatagaaatccaaacacttatgcccactgtatcttagtattggagtcgccaaggaaaacgcagtactgtcaagcactggctggagcaacgcttttactcacatagagaagagacagggtgagatcagctccaacaatgtgcatgagtcttgcatggctagtgggcccctctggcagccaatgcagggcaagaggccttcacatacccatcctgtactgcagtagtaggacgctgacccttcccctgtggggcctgaaatactgaaagctgggggtgtgcttgagggccgttgacacatatgattaagactaacagaggagcacacacagagcctggaacttggcaaggaagtgttccaggcacaaggcccattcttatggggcagagcatggggactgcctttcatctctatttttttgtcttgctcttttactcctcccacacccccgcccttgctgcttcctgcttctccgggcttaaagactgtagtggtgcagcgtattggtgagtgggagagaaggccttatttctctgttagacttggtgggtctgggggtggcagatgtccctagctgcctctttctcttatggtacactattatggcttccttggagagtcctccctgaggatctccaattccggttttctggcaaggagcttcctcttccagctggctgtttcctgtttccccttagatcctggatctgtctacatctagcctctttattcacttttgtcctcttcaactctagacatacatctgacaccaataaatcctgccgtttggctgtgtctcaggcaggctgctacaggtgctctctctcctttggactttctaagagtgaggctggtaccatcctggaagttgaagggacacatgccctccacctggttcccttaaagccatcttctcttcactacaggtgaggaagggaagtgccacaacacagaataccatacacatccttcatcttcaatctcttcagcctcttgtgaaccccaaatatctgagacaggcctcaatcaatttagaaagtttattttgctaaggttaaggatgcgcctgtgacccaacctcaggaggtcctgatgacatgtgcccaaagtggttggggcacaattggttttatgcattttagggagacatgagacatcaatcaatatgtgtaagatgtacattggtttggtttggaaaggcaggacaatgctaagtggggagggggcttccaggttgtaagtatataagtgacaagtgtttgcagtcttttgagtttctgattagtttttcctaaggaggcaatcagatatgcatttatctcagtgagtggagggatgactttgagtttatcttagtagctatctttcttaggaatagaatgggaaaaaagtttccctaagcagttcccagcttggcttttccctttggcttagtgattttggggtcccgagatttattttcctttcacattcctcatgaggatttcctttcaaatagttcttccctttgaacaaataatttcattcctggggatcagtcctaaggaactaagcccaaataataaaaaagctttctgctcaaagatattcttttcatcttttttaaaaagcttttcctaacatgttctgatgggggcaggtgactggcaaaggctgttagaactggttttagccacacgaaggatccttgggaggtaatttagggtctcaggtgaaaatatgaggcaggaagggtcacattttaacatcctgctacaaatgatttcttggatcccaccaaagaccgtttattaagtctgtattccccacattcttctctctggctagataattccctactgtgactttttgtatctttacaattattttctagtggcagacttcggcagcaatgcaagtttaccacatatactggctttctggtctatctcaacatgtcttcccaccactcactttttttttttcttcatttttggcccatactgaggggttgccagaatattttctcttatttttttaaacaaattcggttttatgtcaagattactaaaattaattttgacatggtattgcccatggtaattttgtgtatgttacaattcataataaattaaccagagtattttttcacaggctcctacccactgcatatttttatcatctaacacatagaaaatgtgtcagtctgttagattcaatgcaagtgctcagagaagtctttgtaactgtactttagattttgagaattcattcatggttccaatacatggcattttacatgtaacatcgcaaatgggtttcattttaagcattctttaaatatggagcttgtgaattacaaaagaatcttttattttacaccagaatacttcacatcttatggaaactcatcattgattttatttaaaagaactagtttttcaagaacacctaaacatttaattatcattaaatcaattaacttgtaacctcaggattatctaactatcaatctggaatgtccagtcaagacaatgaaatattaaacatatttaaggggttataaatatgtggagggaggaactaagtgacagtattgaaaactttaaatatatggggattacattatattaatgtatttaattggtatgtttattatatatggattatgatatattattagaagtttaaataaacacaaaaaatattaaattttataaaagggtaaataatgaggctaaatataagttaaacataaaatatttgattagcttttcttcataaccctataagtacttaggttacatagtataataaaatagaatgtccatgtgcataaatagcacaaatctgcaattagtagaaatgacctgaataggccaggcccagtggctcatgcctgtaaccccagcactctgggaggctgaggtggacagatcacttggggccaagagtttgagaccagcctggccaacataacgaaaccccatttctactaaaaatacaaaaattagccggacatggaggcacatgcctataatcccagtgactcgggaggttgaagcacgaaaatcacgtgagtctgggaggcagaggtcacaatgaggtgacagcgcaccattgcattccagcctgggtgacagaaggaaactgtctcaaaataaataaataaataaaataagataacctgaataaaaattatttaaaaaatttttaaaaactgtaagagattacctaatgccctaaagtaaaactgtagcaaatgaaagatgtacattttatcaggaggtagggttaaatagtaaaaaattatcttttttcaaattaatttatcattttaatattataattcaaagtccagatgggattcttttgagagaaactttgtaaaaaaaaaaattaagaaaaatattttttttcttaaaatagaatattaataagtggtggagaattgtaccatatattaagaagtattatgaagcttggattccttaagcagtgtgggcttgatataggctaatcactagaaccaggtagctcagatgaactctatgataggtaagctgcaatatatggtaaaggaggcaccacaaactaatggttaaaaaagtagtatttaataagtagtgttgggacaactggttatctgtttacaaaaaaagatatctttggattcttacctcttaccatacaccccccaaaaatctacaagaataaaagagacttgaaaaaatcatataaatttaaaagtttagaagaaaactatcaaatctctgtttgggggaaggtttaccaacttaaaaataatggaaaaactgtaaggacagagatagatgttaatgccataaaaataataacttatgcctataaaaaaatcaaagggcaaatactttggacattttttgaatcaattgtgaatcacattcattttcttccttatgaaaagccacagaaatcaatactggaaacatttatttatttatttattcattatactttaagttctagggtacatgtgtataacatgcaggtttgttacatatgtatatatgtgtcgtgttggtgtgctgcacccattaactcgtcgtttacattgggtatatctcctaatgctatccctcccctcttctcccaccccatgacaggccccggtgtgtgctgttccccatcctgtgtccaagtgttctcattgttcaattctcacctataagtgagaacatgcagtgtttggttttctgtccttgcgatagttttctcagaatgatggtttccagcttcatccatgtccctacaaaggacatgaactcatctttttttatggctgcatagtattccatggtgtatatgtgccacattttcttaattcagtctatcattgttggacttttggattggttccaagtctttgctattgtgaatagtgccgcaataaacatacgcatgcatgtgtctttatagcagcatgatttataatccttttggtatatacccagtaatgggatggctgggtcaaatggtatttctagttctagatccttgaggaatcgccacactgtcttccacaatggttgaactagtttacagtcccaccaacagtgtaaaagtgttaataatggaaactttaaaatcatgatagataatgtgcaaaaatcattgctagaaaatcataaaagatgagcaacaactaataaatgaaaatgtggaaatatttcaacacatggtgatcaagatttgcaaattaagataagaaaaaaagtatttcttcccagcaaattcacaaacataagctgtttttaatgagacaacttactgctaataacttaagggtatcttgtagagaggagtgccaattgttgcaagtcttttggaaaaactttgataatgtataccaaaacccttcaagtatttcttccctttgaactaataactctattcctgaaaatttatcccaagaaacaaagaccaaatgaaaaacctttctgtttagggatattcttttctggcttaatgtgatagcaaaaattggtaaccattttaacatgccatagaataaaatagttaagtaaggtcaggaatcaccactcaatgagatattatgtaattgttttgaaatactttgtaaaaatttataataagagaaatgttcatgccataatattaagaaagcaaggtactttcattatatgttatgaatgtttatatataggagttcagagttccatatacagaatgatcacaattacataaaaaggaaaaaggaataaaacaaaaccccaaattccatttagataaatgaataaagaaaatcatttcatcaagtgttaacattgatattgttttggttagtgggagtacggttgattttttgtctccctttttttcctgttgttttccctaatgagcatatatcactttgagaatggacaaaacaagaaagttttgaaacgtagtatactcacacataatggtttccctgtattgatctacataaatgtgtgattttattaagcggaagtctattagtacaaaaatctacttcctattacagtttgtcacttcaggcagttattaaggtctttcccaccttaaagaatataaacctatttctttagttctgcagcctaagttaaaaggtgaagtaagtgctaacatttctttttttaagaaagagcatcaatttcagcacagactttccacctagcactgaaaatgtcactgggaaattgtagtccttaacctaaaagcttaaaatctcaattatacggatgaatcagttgagactcatgaataatatgaaaaggtcttttaatcataaaaaggcctggacaatgaaatgaatcactttgaggttagctatttttatagaaaatgagatttttttttttcaaatagttgaaagcgtgaatggtgcaactggaaatcattccaacagtgcaggaaaaaatagagctataaataaaatgaagaaacaagtaagcaactaggaaacggaagagcaagctgaagcagcaatagaggctgaaaaaccagcagtgaattcaagacaggaatctgtaagtgcactcaaaagatgacataaacagagagaaaagaccctcttcgtaatgtgtggacccatgtgattttcagaatctggttttatgtactgtaaaagaggattataagttagggcctttggaaagaaataattttttgccactatttctattttattgtattttgatatggggtctcactctgttaccgaggctggagtcagtggctagatactggttcattgcaacctcaacttcccctggctcaagtgatcctcctgcctccgcctcctgagaagctaaaactacaggtgcaggccaccaggcctggctaatttttaaaagtttttgtacagatggggtttcaccatgttgcccaggctggtctcaaacttttgagctcaagtaatcctccgaccttggactcccaaagtgcttggattacaggtatgagccagcatgcctggctgctattatttccaaaataataacacaaataattattagaagtaataataatcatataatttccagattctaataactcattttgaaaaatatggttttcatagctgattgaagaactacagattgttagacaggtattaaccctagtaaaggtgtgataccttcatggagtcaacctaaaaacgcagacaagagagcaaaaatcccagtcttatgggaatttctaaaactggattgtcctttagttttctaaaagtgctttttcatgcaacatctacaaaattcaactcattctacaagtttgatgtgcagaggaaaacaattatttttttctatcattgatctctccttcctcttgggaactcacctgctggttagagggggatatgtgcagccagtttaaagcatgcaccaatctgatgagttaggccttcaaagcagcattcagaccctgttgtgtaatagtttttagtgtcttaaaagagcattctctccctaagcttctatccctagatggagtccaggaatatgccagatttccttctgcctttgggtccttttggatcctattttcttcagatggtgatatggtttggctgtgtcccaaatctcatcttgaattgtagctcccataattcccacatgtcatgggagggacccagtgggaggtaattgaatcatgggtgaggttacctccatgctgttcttgtgataatgagtgagttctcacgagatctgatttttttttttttattattatactttaagttttagggtacatgtgcacattgtgcaggttagttacatatgtatacatgtgccgtgctggtgcgctgcacccactaactcgtcatctagcattaggtatatctcccaatgctatccctcccccctccccccaccccaccacagtccccagagtgtgatattccccttcctgtgtccatgtgatctcattgttcaattcccacctatgagtgagaatatgcggtgtttggttttttgttcttgccatagtttactgagaatggattaaaaagtcaggaaacaacaggtgctggagatgatgtggagaaataggaacacttttacactgttggtgggactgtaaactagagctgatggttttataaggggatttcccccttttgctcagcacagttctgttgccatgtgaagaaggtcatggttgcttccccttccaccatgattgtaagttccccaaggcctccccagccctgaagaactgagtcaatttcacctctttctgttataaattattcagtcttggttatttcttcatagcagtgtgagaacagactaatacagatggccaagattgtagctggaaaactcccaatcccttgtaatggcttaggcattgttaaaggaatggcatgccatttccccttctgttctcagagcataaagcttttttgattaaattattttctttaaattttctgtgcttatatataagtgcatgtatgttcatgtttgtgtgtgtgtttcatggggataagaaagatgaggagaaaaaacataggtaatacaatccatttagtgtctctaaagtgctaggcatttatagtatcattatcttatttgctctctgtggaaatcttagccacagttatcatcactttctaatcaatgaagatagtaaagctgcagtatatcagaatggagcctgtgtctatttgatctcaaagattgtgttcattccattccttaaagaactaaaagtagaactaccatgtgatccagcaatctcactcctgggtatcttcccacaggaaaagaagtcattatacaaaaaagatacttgcacacacatgtttatagcagcacaattagcaattgcaaatatatggaaccagcccaaatgcccatcaatcaatgagtggataaagaaattgtggaatatatataccatggactactactcagccataaaaaggaatgaaataatgacatttgcagcaacctggatggaattggagaccattattctaagtgaagtaactcgggaatggaaaaccaaacatcatatgttcttactcacaagtgggagctaaactataaggatgaaaagacataggaatgatacaatggactttgggaactcaggggaaagtgttgcagtgggctgagggataaaagactacacgttgggtataaggtacagtactcgggtgatgggtgcaccaaaatctcagaaatcaccatgaaagaacttactcaggtaatcaaacaccacctgttcctcaaaaacctatttaaataattttaaaaatgcaaaaaacaaaaagagattgcactctttcctttatctcttgggagtggtaaagtggaaaaaatagttttttatggcctttggtgttcaatttgtaatgttgccatccaaatcagttgtaccagtttgcagtgttacaaattgtacagagtatttctagtgtggtaacatccttattcaatctgtgtgctatttccagaagtgttttctaatttgtaggtccatgttaatatttcaagtttgctttaatgtgcaatctttgatgtttagtgagaatgaacacatttccatttgtttgtttaaatgtaattgtgttctttcttgtacaaattgttacatattttcaattttaatgctagggcatttttgccttttaaaataaattttaatgagatgatattttatagaaatatttgacatactcaatatcaaatattgttcatagtctactggtttctttatcaattgagtttttaatatatcattttaagttttacatatctaaatttgtcagttttttcttatgattttgattggtactttaggcttgagaaaaattattatttgtctgcagatataatcaatattttaattattctaatttttatgaatttgttaattttataatgttttataatgttttaacatctaacacaacttaattcttctaagagcaatactttgcttttcttatattttaaaaaccagtgacacttttttcagtgtttttataatattccaattattctaaacacttttctaaaattgattttggaaatattttgttatcttcccacccctctctattgagagtttgaatgcaatggtaatacttctacaaattaactttgaagaaatattaatctctttatcaaggtttaaattataacttcacttattaaagtttttctttatatttcctacttaacatttttcattataaaagttctatgtagcttttaattaagctttttcatgaatatttgctaactctattattcttgagaatagatctcttttattattatgctttagcttccttttacgggatataagactttgatgaactttttggatgttctatcttttcatttcactgttattatttctaattggtaatttatctctaatagcagatttattcggctcttttaatgatgcaattattctaattgtgcataataatttttcagttcccaatatgatttttatatcttacttgaatcttaatgatatttattattattttagaaaaacagttgtagaagagacatcaattaatttgccggtcttgtccaatctccctttctaactgttctgcttgctagctcagcactatatgtgtgcttccgtaatgattgattggataaaaaatgggcacacgccttagggaaagctgattcatctgccagccagcaaccagcaggttaggagtcagacaggagctataagttcatgtactgttgatactgagttcccacacacatgcacactcacatgtatgacacacgtgtacacacacatacatgtgcacacacacaccaacccacaaaagccaatccaagagaacattcagactcggaaagagctgttttgttatctttcaacttctcgtgagaagcagttttccctttaggtttttcaattaattaattaattaattaattaactttttgaggcagggtctctctctgttgtccaggctggagtgcaatggagctatcgtggctcattgcagccttgacctcccaggctcaagtgagcttcctacctcagcctcccaagtagctgggaccacaggcatgcaccaccacgcctggctaattttttaaaatttattatagaaatggggtctcaatatgttgctcaggctgatcgtaaactcctgggctcaagcgatcctcctgcttcagcctcccaaagtgttgggattataggctgagccactacacctggtgtccctttaggttttagattctactataataaaccctcctttctgtgatctatctctagtgggattctgtttctcaaaaccaaaaattctctgaccaacacaatactgataataggtatccttactcttttcttgtgtttaaaatgaatgccacatatgtttcaagttttgatttaatataaataattatagtaaagtaaaattttttattactttaaaattattgttatagggtataaaattttattagatgtacgtgtgtggggaagatctgttgaaattatcacatgcataatttcaatagatgcccactaacacatggatattttcttatttaatttatatgttgtatattatatctatagataaccaaatatattaaactataacttcagcttttctggtatttggttaaataatcttctcatcacatgacacaatgatgagaacagacaatatctcaaaagacaaagaccagctgggtgccatggctcacacctgtaatcccagcactttgggaggccaaggtgggtgtatcatgaggtcaggagatcgagaccatcctggctaacacggtgaaactccgtctctactgaaaatacaaaaaattagccaggcgtggtggtgggtgcctgtagtcccagctactcgggaggctgaggcaggagaatggcatgaacccgggaggcggagcttgcagtgagccgagaccccactactgcactccatcctgggcaacagagtgagactcagtctcaaaaaaaaaaaaaaaaaaaaaaaaaaaaaaaaaaaaaaagagaccatgactttcttatttttttctaggggagcaccacaaatgtattaacaaagatacattttaacaacttttattttagtattactgagtagcataatggtcctgttgatggttccatcccatcccaaggctctgactctgtcccagattcttaacttttcttcttatcaaagctagtctttttataatttaggaatagacttccgataaatatctgcttataccatgtcagtctggagtgctgctgaaagatatttttcctatccctatccttcctagcactgctaagggagtgaggtcagacaccacccagtaacacaaatagtgccatcttatggctcagcttcaccatctttgcaaaacatgtgtaatactataccatggaatagtataccatgtataccacttactagtacctggtatagtattttcatggtattatactatagcatgtataacattaatttaatcttttttctccaaccttttaatatgaatacattctaacatacaggaaagttgaaaaaatagtacagtggataaaatgcttaacacctcttctgttaccatggcttcttcattctcaagttttaaattttgactcatctattaattggctagattttattgtcattaagaaggaattcatggatttttttactttttaatatttatttatttatgagacagagtgagtcttgctctgtcacccaggctggagtgcaatggcacaatctcagctcactgcaacctccacctctcgggttccagcaattctgcctcagcctcccaagtagctggaattacaggtgcacaccaccatacacagctgaattttgtatttttttttagtagagacagggtttcaccatgttggccaggctggtctcaaactcctgacttttgatccgcctgcctcagcttcccaaagtgctgggattacaggcgtgagccaccgcgcctggcctcatggatgtttttattccttcgtttcttctatgttcaataatgtctacctgatgctatgtgaacaacctctcttggctggagataattctcttgggggaaccattttttttcccttagagattaatagacattattccatcatcacctggcattcattggtatggtgaataaatctacggccagcatgattttttttctttttgtgagtgatgtgcattatttgtctggatgactgtgtaattgtttattcttgatgttacttagtctactagatggttcttggtgttgaaaatcccctataacacttgatatgttcaattatgatatgagcttttgttcaggctcattggttgctctttgaattttgggatatatgtatatatatatcgtattgtataatacgatatatatattgtattacaacttacaacatattttttcagtttcacttgttgattatctcacgggcaccaattcttctttggctatatcatctttgtcctccatgtaacttagttcctttctaattgtttagatgtctttgttttttaaatttgcattcattatttttatgttcaattttccacatgttagtagcttgctctttagcaatgtctattcagttccttgctagttctaatacgttttttagttcagaaatgatgttgatttgagcatcaatttattgcctcagctaggcaatttctcttttcatcttattctatccttttaccatcttaccgtattcatttaataattacgttgtttcatagcataacacagtggtagagcactttccctcgttcattgagtaatttttccttctagcattggttctttgtctttttgacattctgctcccttttctactcccacccttttggctgtcacatgtttgcattgttgccgtgctattttttttcttcttgcttatgacttggcagtcctgtgctgatgttccatttgatctggtatagagctgggtgatttcttaaccctcttcctgtcatatgagagtttgttttcctctgtaagctacagtttgatagttaagtcttttgcttctacccatttttgagtcgcctaaggagaaaatagaggatacgaagaaaggtcggctgaggagctctcttttaggatatttaggatcttttgtgcctttgaggttttttgtcacatacgtgttctgtaacacttggctaggaatcatatattttatttccgcttggaggcaggaagggccttgagctttagcttgttcttcagttgtacttcaatacaggatgtaggtctgtagtttccattttcatcagagagagttatgtacattgtctgctttctccatttaacctgcctcaccccaggaaccactccatcattcttctgttaagagagaaaatgatacagatatatgttcagtctgcttctgttcaggttgagggtattaacaacaaatttcagaactttgtaacctcagtgacactccttctgggataagctgaggtccactaggagggaactggtttggatgccagctgtactgcacccctcccctccactgaagaatgccccctcccctgcaactttccttccacgatttcgtttaattatttttccttctgtaggttgctgtagctcttctttgctcacttgctaagtgtcaggggaggcaagttctgtgttgcactttaaatttattatgttcattcagaaaccctgctaaacaccttaatagcaatgctgggaggagaatattagcatgcccaggcagcaaaggaacaacaaagcccagggttgttaagcgatgtgcttatggccgcataaattagtatgtggaagattcagaaagcaggcccatttttttccattccagaccatagcttttttttttttttttttttttgagactgaatctcagtcacccaggctggagtgtgcagtggtgcgatcttggctcactgcaacctctgcctcccgggttcaagtgatttttgtgcctcagcctcctgagtagcaggaattacaggagcctgccaccacgccctgctcagttttgtaattttagtaaagatggggtttcactatgttggccaggctggtcttgaactcctgacctcaaatgatccccccaactcagccacccaaagttctgggattacaggcgtgagccactgcgcccaacccagaccatagctttttgtattacagtcccaaatacaagttaattatttcatcaattaaacaaaaatatacacatatatattatataatgtatatacatatatatacatatgtatatattatattgtatatatgtatatataaacattatatatatatgtatttatacgtatattttatatatacatatgtgtgtgtgtgtgtatgtatagttctacagtccttgacgtattttgaaaattccaaaattggctgggtgcggtggctcacatctgtaatcccagcactttgggaggttgaggcatgctgatcatctgaggccgggagtttgagactaggctgaccaacatggagaaaccctgtgtctactaaaaatacaaaattgcctgggtgtggtggcgcatgcctgtaatcccagctacttgggaggctgaggcaggacaatcatttgaactcaggaggcggagattgtgatgaaccaagatcataccattgcactccagcctgggcaacaagagcgaaactccgtctcagaaaaaaaaaaaagaaaattccaaaatgaagggttatttgggaaaaatctataagcttacctttgttcaatagacacattcatgaacagctgtgtgtaaagttatgtctagatagaacaatatttaaaatgcataattgtgtacactattttaaataaccctggataagatattccaaaatttaaggaaaattgtagtaatttgattttttaaatatacacattttagttttgtgtgtgtgcatgtttagagtgaagcacactcatataggaagttattggctgagcatggtggctcatgcctgtaatcccagcactttgggaggctgaggctggtggatcatgaggtcaggagttcgagaccagcctggtcaacctggtgaaacctccctctctactaaaaatacaaaaattagctgggtatggtggcacacgcctgtaatccaaacttactcgggacactgagtcaggagaatcacttgaacttgggaggtgaaggttgcagtgagccaagatcatgccactgcactctagcctgggcgacagagtgagactccatctcgaaaaaaaaaaaagaagctgtcaatatcaagaggctttgtaaaacctcctttgaaggcatttaaatgagaatttttttttttttttttgagacagggtctcattctgtcgcccaggctggagtgcagtggtgcaatctcggctcactggagcctatacctcccgggttcaagtgattctcttgcctcagcctcccgagtagctggggctacaggtatgcaccaccacgcctggctaagttttgtattttcagtagagacggggtttcaccatgttggccaggctggtcttgaactcctgacctcaagtgatccgccctcctcagcctcccaaagtactgggatgacaggcgtgagccaccgcacctgtcctgtttttcatttttatttttttacctaagctaggacgttttgtttttgtttattttgatctgtacttgctgtccctgggtataatgtgtagagggttctgtgttagggcctgagtcttatttgtatactcatcgctccaattttctgattcagtggttcttatcctaccctgtacacaaatattatctaggatgtttgttaaaatatagctgggacccaattagaaattctgactcaaaagtattggggtaggacttaggagtctgcattttaacaagatctctagttccttttaaggaagatagtccattgactacaattttagaaacactgctttagatcatttaatagttgagatttggtgtatcaaggggcatttccccagcttggttatcagagatggaagtattcctcatgtctcacaatagccctaaaggatagaacacctgatataaaatggtgctcttagtcacatagaaaagaatgtggaatttaagatagtaatgttaggggtagacatttgaataaataatttttgcctaattagctttcaatggttagcttatgacagaaaatgtgcaaaggcagatattagaattttacaatccttctgattgaaaatagtaattttttatttttttttctgttctatttagacctttaatggcctgggtgatatccacctacctcggtgaggacagttttttttactcagtttactgagtcaaatgctaatctcttccagaaagaccctcacaaatacacccagaaatagtgttttactaactatctgggcatccctaagcccagtcaagttgacatataaaattaaccatcacacaggaggccatttaaaagtttttttgtgaggctcaattacgataatccatgtacaagctttctgaaatgcgtaagttatgatacatttgaaaagtgtaacatcactgatgctccttgccataaacttaggcaatatgaaacaatcttgctcttagaaccacttcaaatgattggtaaattggggtcacttatggtaattttatttataatctttaatcttgtatctacatctcttttctcctcttccttctcttacattcagtaaatctaaggcttctttgagtttctgtgccctctcttacctattggcaatgtctgtaaagacacagctcacctctttcttctcttctgggaaatattattagccattatgctttcagcccacatttgttcacttattatttccctgtgtagaccctacaaaatgggaaccagatctttttctatagttttagataaaggtagtctggcagttttctagagaaattcattattagaaatttattctaatgggaacccatttttggcttactctgttggttgctttgacctctgtttttccttgcagagctcgacttattaatatcatttaggagcactgggaaacatcattctgcatatttatcaggcaattcatacacacatccctacagttcagtgtatagagcttctctgttttggacttaaactgaaagattttaatgactggtcgtattggcccagctcctaatatgcagatgaatcattgtgtctgcactgcggagtgttggccatctttttacttctgcttttcttaagtagatgcaaatattgaggggatcctaaagaaggacaggaagagtaccagcatttttttttttctaaatctgccactaaagtccctttggattggattttagatagtcatggcatttgaataacctgcatttattaatctctggaaataagtgaaaaactagaaaaggctgaacgtacaatcaatataatgcaatactggggcctaacaaagtggataaatgatatttatcagcaggcgactgctgtttaattcacaggcacaaatgcccacattcatctgtgacactgaatcagttttcttgtgagtgttgtcttccctgaggtttctttctcttactcttctctccttgctcaaatttcagagttgtcatccacaattctgggaaaggtgatgtttcacttgcttcattcaataaagatggggtttaggggggtgacacaaggtatggctaccaatgtctaatgctggtattatatcctttatccagtatgctggggagaaagtacaatcattttgctttacttcatagctatctggttcattaaatcccatgagtcttggtaaattatgaagcaattattgattttgttgtggtcaacatcaagatatatattgattttcccaccagtcaatagtttccagaggcataatcaatattgatgtttgctgaacatgtgtgttaatgtcagtgtgggtatatgtacttagatctctacactcagatatttattttatactctttctgaacgtttttgtaaaaaactattttctcccaaagatcctattattttttggctgatttattcagttcttcctttttgctttacatttttaatctcatttattcttccccggattgataatggaaaggaaaactaaggctttggaagaagtctatttgcctttaatgaaccggttgggggtgagtcttcctgatgagattgtgattaattgcaaagtgagtattacttcttgtctccatcctgtcggttcgatagaatgacaaaaaaagttgaagactttcactctccattccagcatctaccagaccaacataactcagtaagcacatctgagaatccccctcatttactcccagtacttttttcaattatgtggaacatagacgaacaggtcaaacttggatttagacaaagttaaatgatcaactacatgatgcaatttaatgggcacaaaaataaaaaaaaaaaaaacctcttactgtcttacataatagcctaaagtctaccagtaggaatttattataaatatcctcttagaaaattcagattgctcctgagtaaattagaatatcaggaaactcacccttagccatctattgaacacatactagatatctagttctttgctatcattttgagttggcactttacttggttgactccgtggttctttagtctttatctgcactccacgtttctttaagctagctgatgtttctcatatattaattggcttcttcgaccagtgaggcaaatgaattagtactcatttcatcagtgagttttttcttttcatctagaaagatgcattccatctaggaaatgggggatttgatggcatgtgagaaaggtgagaagaaaggaataaatttaaagtacagcaaattgccatcctatacatgcatgtgtgcatgccctctggtatatatgtatcagatgctaggtggtaagcaataatttgccatgaagcagtttggtaggggtgaacttctcagagtaatttcaagccagttattgactcccaataacaacttagcattctgattcccagaggataatgtggtcaagaaaagagaaagataacgcatacatgacaaaatcaacctccctcattaaaacaatttccctaattgatcagtgcttcagagcattccatgtagtggccggggaaaaagtgcagtacagaaaaaaactggttcttgcaaaagagagatagctttgatgtgacagagacagtgtgacaataaccaagtccacttttctgtaatactgatctgccaatgctttgtatagtgcttaagacccatgtggagaaaatagcagttcacattctgttgatgcatatttaaagctaagaacttaaaaatgagattttatgtttgaattgtttttgttgctatacttttgagccagtgtgattctttataaaatgcatcaacatgattttcaaacgttacatggggataaaagaaaagccattctaaagttaaatatatagattttcgcgaagcttatatagtcaaggtagcctttttacttttgacttctaatataaagaggaattatgttgaaagcagttcatgtggaagcaaagtattgttcctgcagaatacaggaatagatggacaatttgtgaatggctcctttttccttcccctttcatgctatgtaaaaatctggattataaaacatatctgtacaagggccttttttttttttttctgaaagcccacatggatctggaggatatgtaacatcaaaatgttttgttgtctctcctgcagggaccccatggggaccatttttttcatggctacagactcagtttgacttgggtctggaatggccttggtgtttcgaggaaggagacaagcagttcttgcctttcacgtgaattgtccatcattaatcccatatttaatggctcctggtggagctgtactccattccttgctgtgatatcccaggaaatgttcctactggctcctggaaaattgtgaggaaaattaagtttgatttggatacccaaagcatccactgtgtaccatttcattcctcacctcaacaatccctctttcgtggctcatggtcttatgttcttatgtattacacaaatattattatatgttcatatattttaccttatattttcatttattaagagtaaggttttgatatgagtactataaatatgagccagtatatggttattaataattaaaacaatattatttatacatttattattatgcaatgaaaacttgttccttatataagagaaattttaggaatagcagcaaatggggagatacattcggtacaaggactttaatagtgacactgaagtgactggtttcagcagccactttggcctatatggccttgcctcgagacctctagaaatggcatcattaggccttcttctttctgagttctttccttcataagttatgtacctgataaggactttatgcatcagaaagtatggcgtagtatagaacaatacaggcagcatggcacagtggaaggaactcagggctagttgtcaagagatttgggttcttctgcgtgcttaatgctagttttatgatttggacaaatcacatcgcctacctggacatcggtgtctacatctgtgggatgatgatgatgatgacagttaagtgcttaacaataacgaactcatttaatctttgcaacatcctaatgaagtagataccatttttctcattttacagatgaggatgctaagccataaaaaggttaaatctattgcttaagttcactcagcaaagacagggttaaggttatgtcttcctgtcctgggctcctctcttcttgacagtggctaaagttcctaaagtctcagattctattttaatgaaaacttgcatcggtgaagacacagataaaacacagttctggaacaatgtattccaatggatttgaaagccattcaataaacatgaccataacttagtagtttgtttcaaaaatacatacttgtctatcctctctctctctctctctctctctctctctctctctctctctctctctctgtctctctctctctctcacatctattttaaatgtagacccaggaatcaatgtggtcaagctgctctcaaaattctaatacatggaattaatggctaatggctcctaatagaaatgaataattatagaccattgctaaccaccactgagaagtataatagctaatcatttctctctaatggctgtttgtgtcacaaacagaaattttatctaagaagagagagaaaacaacaacaaatgacagggtcttgctccgtaactcaggctggggtgcagtggtgcagtcatagctcactgtaaccttgaactcccgggctcaggcaatccttccgcctcagcctcctgaggagtagctaggtcttcaggtgcgggccaccatacccagataattaaaaaaaattttttttcttgtagagacaaggtctcgctatgttgccaagtttggccttgaactcctggcctcaagcaatcttcccaccttggcctcctgagttgctgggatttcagttaacttatcaaaacagtaatgctatgtcataatatcacatagttttgaaaccgttttcagtgggaagtgctttgtagatttcttctcattcattcttttgctatctgtatttttaatatattatttataaatttgatcttgtttgttcctatgtcatctctattgtaggacttaccatcatataatctagtagtaagttttatgagagctctccgtgccccatagtctcattgaaccaaccatctctgtttcttcagcacctcatggagctgaatgtttctttttacactgtgaataaagggacaggtgagttgttggaatgttctctgattttggggaatggagaatctgggttcatacagtgaaggctttcgtgacagcctggtctgcttactgaaagcttcagctttcttttaatgcttagtgtatagatgtgataaaatcactcacagaaacaatgattcgtcttcctagacacatctgtaggagttccttgaaggacagtggatctagtcctaaatactttatattcaccccttcaatgagtaatcaacttcactccatccagaagttgggtagttaggaacttgaaaacaatctaagaaacttttgcaatttcaggcttaaatgatagtgtatgtaaatgtacatgtttctgtcacatcatagaaattaaatccaggagccaaagaagcctttgttaattttcctagaaagagaagcaaggggaaaaaaagggcgagtctatccagaaaaccgctaagtgatctgtggctagcagggcatcccacaattataaacatttttttgaaattatctaggcagtatcataggtcttatttcataacatctcaaactaatatcaaagagaaaaaaaaacttctaacttattcctttgaaatataattgatggccataagtcccagtaggcttaccagattcttccttgggagcaggaagtaaatatgacaacagaccaagactaaagtgataccaacatggaacttcagtctgttcaaataggaagatgggccaggacccatcttagagttgtggtgtccagtatggtagccatgaactccatttggctctttaaattaatgaaaatgataaataatttaaaaactggtttctccctcacaccagccacagttcaagtggtcagtagccacatgtggctggtggacatcatattggagagtgcagattattatacaatgttgtatgtacgcattattgtcatcgtggaaagttcttttggacaggactggcttacagtcagagctttcactgttagaaagtgaccagtctaactgattagaaagcaaggggtcactagcagcattggttagttagattgaaggtcaataactacagtttagctaggtttagaaatacaagcagaacatgatctggataataactctttgctgcttaattgctaaccaaaaacagccagatagtgaccgttttggaggtgaaggggatgggagattagattggcttgtctttcatatgaaaccactcttgactttgatgtgaagtttaaagatttgatcccttcctaggtcttctgcatcctattttaatatgctaccacttactttagaaattctcatatctggattttatgatgattggtctggtgctccacagacctcaccagaaactttaacgctacgtgccttgggctttcttgctggaaaatatcctgtgtagaacactctgtctgcctctaggtaagtgtcattttcggggagggaatctccctgaggacttctgccatttcagatgagaaagcccagaattattcttacagcataagatgccacatagtggttatgatatgaatataagaaatgacttagaggagatgcggggggggtgctgctgcaaatatacattcaattgcttgagtaaaaatcaaggcaagaaaggtgggcttaaattatagaaaggaaaatgtggggtggatttctgaaaaatgtgagtggcttgtaggatttcgccgtgggaagtttttaatcagaaaaattgaatacttgatgaacatctcttacctggtcaattgcaactatcttccaaatagactttttgtcattagcattcaccatgactgcctcttccccacctcacacacacacaacagatatgtccatgttctaatccttggaaggtgtgaatgtgaccttatttggaaaagatgttttgcacatataattaagctcagaatgctgagatgagatcatcctgaattacttgagtgggccctaaatccaatggcaagtgtccctgtaagaaacagaagaggagaagacacgcataggagaaaaggtgaggtgaagatgagggcagagattggcataatgtggccatgagccaaagaaactggcaacctccagaagctggaagagacagacgatggattcttccctatgtgtccctgctagcaccttgatttcagacttctggctcagatctttggcttccagaactgtgagaaaataaatttctgttgtattaagccaccaagttcatgggaatttgctatggcagccatgaggcataaatacagataccctctgatatatcctccaagtcacttctagaatgacccatttaagacataaacattatgcacagcataaagtccaagtctcttaggagagcttccaaggaccccttgatctggcctctggcttcttctctcagtacacagctctccggcacccccataacatttaataagactagagtctcttattacctggatatactgtctgttttaccccaccgtatctttgaacttgcagttctcatcgtctgtgatgtccttttgaggcttgttcatccatggtaacttttttttttttttggagatggagtcttgctctgttgcccaggctggagcgcaatggtgtgatctcagctcactggaacctctgcctcctgggttcaagcgattctttgcttcagcctcctgagtagctgggactagaggcacgtgccaccacacccagctaatttttgtatttttagtagagatggggttttgccatattggccaggctggtctggaactcctgaccttgtgatttgcccgcctcagcttcccaaagtgctgggattacaggcgtgagccaccgcgcccggcccatggtaactcttgatcatctttcagtgtcccactcagtgtcccctgtctgtgaagacatgttagccgacttccctctctcaccccctttttctctgtgtcatctctacatcttgagtatgttcattatgacacagtgctttcttacatccatccattcaacaacttagaacattaaattaatttttagtaggtaagatgtttatgtttcaaaaatacaatgataaaaacggtatccatggagaagtcttactcctatccattttttttctttcttttccctacaggtaatcattaaatttttttttttaacttccacagtttctttatgcaaatacataaattttcattatacaaaggcagtgtactacatatattgttatgaactttacttttttccatttttccatatcattacataaagatctcccccattccttttttttttttttttttttttttttgagacggagtctcattctccctgcactcgctggagtgcggtgacgcgatctcagctcactgcaagctctgcctcccgggttcacaccattctcctgcctcagcctcccgagtagcctgaactacaggcgcctgccaccatgcccagctaatttttttttttttgtattgttagtagagacggggtttcactgtgttagccaggatggtctcgatctcctgacctcgtgatctgcccgccttggcctcccaaagtgttgagattacaggcgtgagccactgcgcccggcctcccccattccttttttatagttacatagtattccatcatatacatggtcctagataatttaactaattctcaattgttgaaccactgaattgttttcattatttgttattataaaaaatgctttaatgaaaaattttgtacatgcattatttcatatatatgaaagcataggtagatttccaaaagttggatttctgggccaaagggcaaatgttactgtcactgtgctagacattgccagattttcctccataagcattgaaccatttcatatgagacagcccatgggcatactccgcaacacaatattgtatattttgtttttttgccaatatggttgacaagtgtcatagttttctatcgctgaataacaaataatcataaactcagcagcttaaagcaacatacatttagtatctcacagtttctgtggttcaggaacccaagcacaacttagctgcatcctcttcttagggtctcaggagctgcaatcaaaatgtgggttgtgactgtggtctcacctgaggctgagagttctcttccaaactcatgtgattgttggcaaaagtcagttccttatggttgtaagaatgaggccctcagcaatgagaagctgtctgcagttcctgggcacatgagcctccccatagacagttcacatcacagcaactggcttccacaaggctagcaggaaagtcccttgctatggtctgttaaagtggtggagtctcataccatgtaacctaatcacgggagtgtcatcccagcacatttgccaaacaacaaaacctagtccagggggtaacaccctatcactgttgtcatattctattgattagaagcaaatcacaggtcctggccacaccaaggagaggggattgtacaggccctaacaccagggggtggaggttggctatcataagattcttcccatcactgtgagaaaataaaaatcctttctttttattatgagtattttcatagatttaattaccacctgtgttttttcttagtgaactgtctgttcatattctttgtttatatttccatccaacttttacttttcttctacatttctatgtgacatgaattgcaaatattttcttccgttttgcacttatatttttgaatgcaaagtttacgaacttaccaatcttttcttttgacttctcatttttgagtcatagctgtaaacgtctcttccatgctaagtatataaagaaattaaactatgttgtaatttttttacatctaaatcctaaatcccattaggaagatttatttgaatatggtatgatatatgaatctaacagtgtcatttttgagaagactatttggttgttccaacattgtatattaaagttcatctttaccaccacagaatgagtatcacctttatcatatactaaattcccacataaagtagattctatttctggaatttatctcctcttctctagtatatttacatatgtctcaatatgatattgttttaattattgaagttttgttatgtattcattggcttctaagacttctattctggagatttcctcattactattactagtttattttccacatgacctttagaattagcttatctaattctagaacaaaatttctttttcagtattcttattagtactgttaaatttatgaattagcttagaaagaattggcatctttaccatattaagttttggtgcatttacaaacttggtgtctttgtttttcagatatatactaatttttcttccctcatattgtttttgcatatttatttttatttttatttttatttttgagatggagtctcactctgtcacccaggctggagtgcagtggcacgatcttggctcactgcaacctccgcctcccaggctcaagtgattctcctgcctcagcctcccaagtagctgggattacaggcacatgccaccatatccagctaatttttgtatttttagtagagatggggtttcaccatgttggcctggctggtcttgaactcttgacctcagatggtccacctgcctcggcctcccaaagtgctgagattacaggtgtgagccaccatgtccggccacatatttcttattaggtttattctttggtattttgtgctttatagatttattgctttggccattatacatgactcttttccattacatcttctacacgttgttgtttgtataacgtgaaaactattgctttctataaattttatatatgcatacattctcacttagaaaacatttattgggtctctaacatatgatgggcttctgtactagcgctgagctcacagtcacaaaatagccatggtccttccccacaatgaacaaatggcctagtaaagaaggcagaaagtaaacatgtaagcaaactaatttataattactatttgaataaatgctatgaagataatgaggagtgttcagtcatacagaataattatttaagtgtatcttcttacccacttagagtcttcgagggtttggtccataacttatttgtctttgggtcctcagagcctcgcacaatgcccaggaaataaagccaccaaatatttattgaacagaatggaaccaaatttgctctgagctcagggccaatgttttaagtcctttagccacaatgatcatgcagtccaatttttcaaccaaatttatattttaaatattgtgtttctataaatatattattccagtactggcctaagtatttgtttggaaaatggccactagagttacagctttcacctaaagtggccttccatgtctctggcccatgagcagagtgggcttttaatccttagcctgagtgtttcagagacaagttagctgaaagggatgctccctttgtaaatttttgactgaggtgtcaaagttaaacttagggtattgaggctagctggagcttatctgttcttccagtccaaggtgttaagatttacatctttaataacagtaggaaagcaagagaagactgtagtggaaaaaattttacttttatgtacaggctttcattgtttcactttccctctccaagtgttaataaaaggtaagtaaagaatttagggattattctgtgaatttttatttatttttagcctatgtggctctggagcgaatttagatcagcttacaggaatatataaaatgcagccaaattaaatacactggaagaaggtgagaaagaaatggggcacgaaacaaagttggagacatttgatagacttgctgtgagaaggctcaggttttggttcttatcagttagaaaacatattgagcataagcacaatttatagttcaattaagatttaaaaaaattcctagtaatggcaaaaatatatgtggtgcttactctgtcctgggcatcattttaagctttttaaatgaattaatttaatccttgcaacaacctgatgagatgagtcctaatactattctgtcttacaggagaagagcaactattactaatattgagataagggagaaaactattcagaggattttcataaagacgatgctgtgcaatagaatgagtagcattctccagtgtttatactctggcactgcagtgaatctcacatgtctgcctttatattatgtaacataatcctgaaactgtcatctcctcacatttgccacacaacataacctaatcaaggagtaatatcctattactgttgtcatattctattggttggaagcaagctgcaggtcccagccactctcaaggggaggagattatacagggcctaacactagagggtggcatctcttgatctaatggcctcatgccaagctcagaatgagtctacagtggccaatgtgataaacgtagcgctgccaatataacttcattcagaggtagatttcagggtacctagaggaatgtgctatttgaatatactttagttaattctctttcttcttcttcttcttctttttttttttttttttgagacagggtctttctcactcaggctggagtgcagtggtgcagtcacggctcagtgtagccttgaccttccaggctcaagcgatcctcctacctcagcctcccgagtagctgggactacaggcatgcaccaccacatccagctaatttgaaaaattgtttgtagggatgaggtctcactatgttacccagggtggtcttgaactcccaagctcaagtgatcctcttgccttggcctcctaaagtgccaggattacaggtgtgagccaccactcccaggccctttagtcaattctttgaaaatattatatcttctaattaagtgacaggtagaaatggaagtgatggcttggagatggtttcaaactttgaattaaaaatgatgaatgagatgctaatgagtagtaggcggttattggcctgtactcacaactaagcaaccttccttttcctgtttgtgaccgtgtcagatgggtgaaataaggtgaatcagttaggttatgttatgctatgttgtggtaacaaatacatctctgaagtgcattgattttgcaccaaaaaatgctcgttttcttctcatataaggcctagttgtgtctaatagctttctttgatttgtagtcatgccacttagagcaaatggtctccaaggtcaatgtagcagaggaaaaaaacagccttggagaaggcatacccactcagaccttcctcaaattggaactggcatattacttccgtttgtgttccatggagaagagttagtcacgtgacaccactgctccaatgcatggggttgggaaacctggagaagtgcatggatatttagtgagtgctggtcatctgtgctgcataaggactaggctcttcttatatctactgggaatttctctcctgctacctttctctttcttcttaaccctttagacctcttgctttatgaaaccatatccttatggtaccagatttcccctattcagacaattcagtcttgactagaggaggcgtctctgagggtgggtgaagtggcagaaaagtagaaaggggagggaaaaggaaagaaatagttccttagttgtcacttctcatttctctcccgctgctggtttctttgctgctccatttctcacggcccagctcttgccgatggttgcaagttggaaggagattgaagagcggagagaatctactctgctatttatactaagggacctctgctatttttcctccttcacctccctttcctttcgttttatttaatgaactcctttttctttttttttttgacagagtttttgctcttgttgctaaggctggagtgcaatggtgcaatctcggctcattgcaacctccacctcctgggttcaagcgattctcctgcctcagcctcccagatagcttggattacaggcacccaccaccacacctagctaagtttttgtattttttgtacagatgggatttcaccatgttggccgggctgctcttcaactcctgtcctcaggtgatccacccgccttggcctcccaaagtgctgagattacatgcatgagccaccgcaccctaaactcctattctacaaagacattttaacatgctttgtgagccaaacacaagcagggtttgggtactgagaaatgcatagtagaaggcatcagtgctccaagaactcttggtcactggtcaacaccaacaactgtaaagtgatagagtgcaaaatagaaatgtttaaaaagtgaacaagtagatgagtgacttaatgcttgactgaatagaatgctcagaacttccacattgtgtgaagagaggaggattcatgagagtggaggctggccttctcagggtagcactgagttggaaggcaagtaaagccagtcaagggagatgcggaagttacaaatctcattgcccttgtgttatctccagtctctctctcacctctttcctagccccttgtttgtttctctcctaccttacaacacaggtcctgatcctactcacagctctcccctcactcctttcctcagccctctggtgcttgcacatggggtagagataaatcatgcttctgcgtggagtttggggcttcaaatgtgtctgtgtatctgccaccccaaattgcgactataatctgatcctatttttttcatacaaatattatgatatagagtgggaaaatggtatcatactatgtgtttagtacatgctagatctttatgatgtaaaaatatatatatattttctgagatggagtttccctcttgttgcccaggctggagtgcaatggcacagtcttggcccactgcagcctctccctcctgggttcaagcaattctcttgcctaagcctcccaggtagctgggattacaggcgcctgccaccacacctggctaatttttgtatttttagtagaggcggggtttcaccatgttggccaggctggtcttgaactcctgacctcaggtgatcgcccgccttggcctcccaaagtgctgagattacaggcatgagccactgcacctggccatgaaaacaattttataaggtaatctggagtcttaattgccttttaataacattgtttacttggtagagatgatgtaatagatgattaaatcccagagcattgacctaaatgatctttgaggctctttccaacctgtagagtatatgattatgcaggaatatgtactctaaattctgaacacatggtttcaaaatgagtctttggaacttagggtattattaatagaaggattgcctgcaatgtggcaagttctcatttcttcaatctttcttccttcttaagttttcactcataacttattctgtgatgtttctctaccatttctgcatgttaacataggattattccttaatccaaaattgctttttgattataagcaattctgaatttcactaggttaaataaatatgtctctaacaaggtagaatgcatttcccagtggatgacaagggaatattttattaatttgcttctaagtcattgaaattactgcattaaaatgtttagctgattcttttacactgatgaaataagaaatgactaattttttaaatcacttccctaaataaagcataccatccctaatgcatgtacaactggaattaatctcaaagagcaatcataagtgacatgcaaagaggattatgtgattttctttcttcttcttccttttttttttttttttgagacggagtctctctctgttgcccaggctggagtgcagtggcgtgatctcagctcactgcaacctctgcctcccgggttcaagcaattcttctgctttagcctccccagtagctgggactgcaggtgcgtgccaccacacccagctaattttttgtatttctttttagtagagatggggtttcaccatgttagccaggagggtcttgatcttctgacctcgtgatctgcccgcctcagcctccaaaatgctgggattacaggcatgagccaccatgccaggccgtgattttcttacagtactttgtcaacaggtatattttcctgaaggcagttacttttgcattcaattgcttttgtgtcacacattttgattattaaaacaaagacaacaacaacagtttgtataccacttgggcataatagtattggatagaatgagacttacagaggtcattaacattaccccctgcttccttccaggcaatgagaattcatcttgtaatttcacccactcaagggcatgggcttcacaatctcctttggtaactgatttgaatatctaacaacagtttctgtcaggattttttttttctcaaaaagtacaaaactgaaatgcctcttgtctgtttttttttttttttttttttgctttttcaagctttaaggaaaaagataaatggttacaattcttcataaactcttgagtttatatttgagcattttattttattttattttatttattttattttattttatattttattttattttattttttgagtggagttttgctctttttgcccaggctggagttcaatggcatgatctcagctcactgcaacctccgcctcccaggttcaagtgattctcctgcctcagcctcctgagtagctgggattacaggcatgcaccaccacgccctgctaatttttgtacttttagtagagacgaggtttcaccatgctggccaggctggtctcaaactcctgatctcaggtgatccacccgcctcggcctcccaaagtgctgggattatgggcatgagccactgaacccggcctgagccctttattaaactcttcagactcaggttgccttttgttcattgtttatcatttttctttaaaatgatccttgatcacttcttcaagtttcttagccagggctaaatttattattacacatatttaggaaagatgctgctcaaagagatgagtgtagacctttgggagtagatattttcaaaggagagtcttggtgaaggaaatttctgagggactaggttttggaaagagaccattaatggagaatattaatggctgctactaaaaggagggtgagtaattggtgcagggaagagataagtaaagaagtaaatggactgaagtggcttaagttaaacaaacaaacatattttaagttcaaagtcattcagaagggggagtgtatgggatgtggactttgtacaaaaatgaaagccatttcgacccttgtgagaaaagagtgtatttagaggcagaaggcaaaatgcacacagcttgtggataaatgacccatctctgggatgaggaaggcacaagtggtgctccgagaatccccccagtgagctgaatttatggtggtgtgcaaggctgaggacgtttattagtaaataacaaagatcgtgtgctaatgacctgatcactggtccataatcaatcagaggttggtctctgtgcataattctcctgggggattgttagaaggaaatcatagctaaggccagacactgattcactgggggcccctttgtcgttcatggggggcagatattctatttctgtacatgtagaacttctctttattagggaagcaggaaggagtgactgaaagacgctgtgtttttctcttgtggtgtggtttctaaatgcagtgtatatctgagtagaaccaaatttaactatgaatatttgggggaaggtaatgagatggtacattattcctttagcaaaggttttgatgagcacaatgtataatataagtatctcctacttaagtacaaagtatatttacaaatatgtttgtttatgtataaagacagaataatagatttatatattatgagtaggagggtgatgtggttcatttgccaatctattaagaaatattataaaattacacattctttcagccttttaatctcaatatttaatatatttcttgtatcttgtacatattatttaattgttttcatacaaaactaaagatgctgttaactggtttgcatccagtaagaggcaatttgaggctaaatacattctgctttcttcatataaagtgagtcttatgtttatttcatcatacttcgaattgaggtggcctatgccttttgtctttagtgttggaactcttgttttatgtttcctatttaacttataatgtaacacatgcaataaaatagtattcgagatgctttgacaaacttggtgttttgatcgaggtggcgctgttggtagaactgttggtagaacctgttggtgggcaggcacaatgccactttatcactgagcagtagaggcaggagagtccctatctgtcacataaaagcagatttagggggatcaatacagagtgcatgaaagtgaaggttaagagaaagtacaatacgtaaaagtcaggaactgtcaatatgcaaatcctcaactctggcaaaaccccagatcacccatgatccagtgtgatgataaaaataagctcctaagtacttttttttttttttaactttggcatcttgtgcaactcatgaactagtagtgttttcctccttattattattagtgttattattcagcattttgctacaccctccccttctttccaacatctaaataccagcaaatatgttatgagatgaaaatgatgacatagcacctcttttctgtcaggtagaaacatctacattcaaggttatctgaaggtaaaatatttactaagttatttactctgtctttctcccaggagtcaaggcagaatgggggtctccaacaagagtggcctggtacatcaccatacgatggggcctatgtgtgtctctcttgtgtttagcttcacgcaagatggggcttggaggtacctgggggcttatttttgttgcgtgcccaccattgattttcctttctagtgtgtgtgaaattacatttccctgcaactgaaaatctgattaataaaagtatgtcattatcttccataacaacaaatccagacatagctgcttccagacggagggtagcagctcagtcatgtcagtagggacagggactgtgttcatccttctagttcatcaccctcagtctgcaggcttttagacctacttaattgttgcaggattcctgccgaactgctgcagtattctcttttttttttgagacggagtctcactctgtcgcccaggctctggagtgcagtggcacgatctcggctcactgcaagctccgcctcccaggttcacgccattctcctgcctcagcctcccgagtagctgggactacaggctcctgccaccacgcccggctaatttttttctatttttagtagagacgcggtttcactgtgttagccaggatggtctcgatctcctgacctcgtgatccgcctgcctcagcattccaaagtgctgggattacaggcgtgagcaccgcgcctggcctgctgcagtattcttggcatcaagatggtactccaagataaggagaagaggagagaaagagaaattctcaactggctttcttttctttcaaccgggaagaaacatctctcccaaaaacttccattttcatttcaatggctagaaacttgtgacatggcaaccccttcttgcaaactgcaaaagagcctggaaaaggagcatgtgaacaaacacaacaacatagctgtgaccagcctaaccagttgccctgcactttgtgtgtacatccctccagatctctacccctgctagcgtgttggccagagcatctttcactgctcctgcccggtcagctgggtcccttgtgctgctgccacagctgctacttgcccagtgacttgccacagtggctgccccattgtgttgtcctagacacaacttgacagcatttcctgaacacactctgcttcccatctcatgtcctgggagttccctgatgtcactagggtaagtgatgtaaacagaccctcacttccggccccctgtgtacaatctggaagtttaggggaggaggtcaacccatggggtagactttgactaacagaagattgaaactcatggatagctttgcctttctgtctgtggcaggactgtcctgggagcagtggctgagaggccatccccatatgcagtagccagctacacccatctcctgtattttctgcatttcttttccatccttccctgcttaatctgtgacctcattcctgctttttggaactatactccccaacaaaatagtagcacacaaggccttgccccaggctgtgtttaataaagactctgactccatttttgatgttcaattgctgacatcctttaagcctccctgctccctctgtctgtgagcagaagccctcacgccagccccatctgccacaaaacaccacaccagtctcctcttccagctctctcaaaccattttcagacctgcctggagccttcctattccccccagaaagccttctcttgtgaataataaacaatttcataccccctaggtgtgcgtatggtgtcagcagtctcaacatcaggaccaaattctgggtgatgtccattctgcttctgcagagtgactgcagcactctgacaccaaacattgtttgttctctgggactaggcacactgccaccctgaacagtgatcagagtccactcagtgaggcagatgtgggaaggacagacgctgtcctggcactagaccacaatgtagagaattggggccaagacccaggaggggacacttagatctcccacccccatggtggttacagagggcttggtaggagagtgtggggagaaatgctcctttggagagagttgaccttaagtcccactgtcagccaggggaagtggtgggggtgtttccccctcacctggagcctagtgagaggtgtcttaagaagattcctagagaagggtttggaagagaatctttagggacaactgttggttggggataaacaaggggatgcttcctccctttcctcaagtcactagtgaggttgtaatagggttgtccagagaaacaaccagtaggatatatagacacgcgcgcgcgcgcacacacacacacacacacacacacacaccacagaaagagagattggctcacacaattgtagaggttggcaagtccaaaatctgcagggtggagggtaggccaaagatccagggaagagctgattttgcagctcaagtctgaaggcagactgctggcagaattctcccttctctagaggaggtcattctttttcgattaatgcctttaactaattagatgaggtctacccacattatggagggttaatctgtttttcttaaagtctgctgatttaaatgttaatctcatctgaaaatgactttcaaaacaatatctagactgttttgaccaaatatctgggtactgtggtgtagccaagttgacacatgaaattaaccatgacatggggctttaaggagtttgctgggaggactttctctatgtacctggaattttggtgggcacacagtggattatctgacttttacggggcaaattaaaaagacgagaggcagctggccagtcactcttagggcagaagtaaaaagaaattgcagttcccttagggttggcctctgtcgctttgttttaagacaaacattgcaggggtgtttctcatggtccagctatgggctatgtcagcaaaggctggcttggaattctcttggggttttgtccaagaaggctacctgcagaggcaaaaaggtctcagcagagaggatctgcctgtatcagtgcattcctggggctgatgaggaatgagggtacatgatacctacagtcagaataaagacatgttcatccagtgtcttagtgtgcttgggctaccccagcaaaataccaaagaacaggcatattgcttgataggtagaacaacaaaaatgtattttctcacagttctggaggctaggagtctgggatcagatgccagtatgattaggtcctggagagggccctctttttcacctgaagacagtggccttctcactgtgtccgcatacagcctttctctggtgcatgtgtgtggagagagagtaagcaagctttttagtgtcttcatataaaggcactaactccgtcattagggccccaccctcatgatcacatccagccctatatacctcccaaaggtcccatctccaaataccatcacattgaggattagggcttcagtatgtgaattttggaaggatacaattcaattcatagcccacagtctgagcaaatacaggggagacttctggtggcagagtctctcaagaatccacaaaaacaccaaggagagaggctactctttaagttagaaatttcccatctcttcccctctcttggaccctcaatcttaaaggagtcagaaactgaagctagcagaatggaaaaagaatgcaaaatgctataataagccaggaagagagactatatcccctccttttccaacgccagctgcctgctagattctggcccaaggtggagtggactcaccttttaacactagattgaaattcagacctgtacatggaaccaatcattttagttactaatttgtgacaatgttttacatatccagaaaagtcttgggctgcctggattttcttcctggagcaggggaagaactagtctgactgagtacattttaagtgagagtaggggaacaaaaataaatttacattttatgagacatatgtgttctactattagctgtattttgcctccctatccaattttaaagggggaaaatttaacttgttaaatgattgtttgataggtagagtaatgaaaaatcccaagacatgctctctagatttgagaatttcacaggtagttttctctgggggaatcttaggaattaaaacattttggctgggcgtggtggctcacgcctgtaatcccagcactttgggaggccgaggcgggtggatcacctgaggtcaggagttcgagaccagcctggccaacatggtgaaaccgcgtctttactaaaaatacaaaaaattagctgggcttggtggcgggtgcctgtaatcccagctacttgggagcctgaggcaggagaatcgcttgagcccgggaggtggaggttgcagtgagctgaggtcgcgcgccattgcactcaagcctgggcaacaagagcgaaactccgtctcaaaaaaacaaaacagcattttaagtagatgtaatacctgcagtggccacttggtggcagccgtccacgaatgctgctttcggctcgctgcccttggggactctgtggttttgtgtgacaagcatttttttttttttttttgtccagcctcctagaaaattgcctgctcctgttttggtggaaactctgttttccctgacagtgtttgttttgtggttgagccctctttggctccgcgaggccaagttttgtgatgctttctgaatatcagatattttagttctatcatgttaaagcagtttggaatctctgttgggtttgaggtttttttttctttagtcttctcctttaactcaaacactgactgacacattgagaatgaaaagctgttgttactttttcctggaaaagttttctcaaatctcagactttctaaaactcctgactcacatcagagggagaatgctgtttttctgccaccctcaagccctcattattcatgtttgcacatgtcattagcagggtgagttttctcttgatttgtaccagatggtgtgattttttttttggggggggtgggggaagagagtagaaacttgtttctttaaactccaccaaaaattgttttctaataggttcattcctttaataacaaaatttcatttatgagggcacagtagcacccagaacaaattttgattttgcaaaccaatgacctttttatggttctttagaaatggaagtcagctgttgtccagaagggttggtggcatggggacttagaaagccatgaagtttgagcgccgctttctaatgtctgacctgatgtttgtggctgcacttgctgtatgtcctcaggcacaacagctattagctttgttgtgaattttagagggagtcacttgttcaggcaatggatactgcatatgtggcactctttgcaggtccagctgggtgacatgctgagaacaaccaggtgtgctccccgagctcatagcacatatggtcaggtggataaaacaaccttgatttcaaacaaaacacccaaaggagtgcatgtgtaatcacacactgaaggaagagctccgaaggaaaaaaaaaaaaaacatgttgtagaatcacagcagacaaccacagacctgctctagctgggtggtcaggccgggtctccctaaaaagttagactgaaggtgaaatctgaaagatggattgacattaagcagggaaaggcagtgagatgggaaggggagtgttggtggaaaagaatgggcccaggcagaggacagaggtgggaatggtgtgtctaaggaatgcaggttggagcacagacagctagaggaagagagcgtgaaatgaggccggggagaacaggctgacccagagggctacggcagagctggtgtattagtcagggttctccagaaggacagaactaatgggatagaggtatatactaaagggtgtttattatggagaattagctctcaaggtcacaaggtgaagtcccatcataggctgcctgcaagctaaggagcaaagaagccagtagtggctaagtctgagtcaccaaacctcaaaagtagggaagccaacgtacagtctgtggcctaaagcccaagagcactcagcaaacaactgatgtaagtccaagagtccaaaagctgaggaacctagaggctgatgtttgagggtaggaagcatccagcatgggagaaggacggagtccagaagacttagccgttctagtctttccacgttcttctgcctgcttttattctggccgtgctggcagctgattagatggtgcccacccagattgagggtgagtctgtctctctcagtccactgactcaaatgttaatctcctctgggaacacactcatagacacacccagaacaatactttgcatccttcaatccaatcaagttgactctcaatattaaccatgacagcggaggagctgttgttgatacaggagggtgtaatgagtttatacattgaaaatagccctgttgctgtagaaatagcacatggaagtgaagtggtgcccaggatgccacaggagcaaaaaggtggccatgcaaatcctggcacaagagagaggaacttggatgagaggacaagggcctggagactagtggccagattcaagagacaggtgggacctaaaatggacggaactttgggaggaattgggtaggaaggggtggttaagggaagacagcatcatgggtcattctggctggagtaacaatgtttgatggtctcttcagcaagtgaggggacacagactgaagacagggtcaaggttagaacatgacttggctgcttaaacgcaaggacaaaggttgggatctccacagatggacacaatggaaagagggagaaagacaaaagagtttggagtattagcaagtcatacaaataaaatgtttctaaaatgctgctttacacatcattaggagtttaattatggttattttcattctctgatctgcttcttctgttctttttctcttccttctttctttttccttcctttctttacagaattttatctcagcttgctcaagtttaattgcagaaagtctcacatttttctaccttatgaatctctaagatcttttccagagtttttacaaagggtttatacaaattttggtaaaattgagtaacttttccaaaagaccagatacctggaccagctggtaatttgtcataatttaaaattatttttattttaatgcacctttcactctatggttttgtattttaatgcatctcttaactatacatggttgatttatagtgtgactttggataagttatgtgacccttctttgcttttgtttcctaatttgaagaatagattagtaaaaagatgatataataatcatctttttaatgggttgttttgaggactaaatgagtgaaaactcataaggtgcattataagcacttaataaatattagtgttgttggtagctattgttatggcatgggccagaatggtagactgggagacccacagacagagctagaacttaagcaatggaggttaaagctatgcttaaattacctatgtgatgaaagctggtgtttcctggagtttacgatgcagtttgcattatggacggaaagtttttctgggtagtgaaaggagagtagccagtgggtgttcatgcttgcatggcgagatgaagaatacacttgggtttacacccctttgtgtctttttggatgggccttctctgagtgacatgaggaatactgatacagctccataatagcagtaataagacctgatatggagtaggggggagctcagcagttgccagccctgaacacactttatctcgttgaactccataagagccctgttgggttgagtctatttttgtttccgttttagcaatgtgaaaaaccgagattacataacttgccaaagtggtggagctggaaatccagatattctagctttagagatcaaccaatgtgaataaacaacttccattttcccagtcacatttccactcctaaagttttccctaatctccaagtttttacactattaagaagaatgcagtcatgcagattttgttttctttaccttgaaagaggagagtttaaccagctaaggtatgtgttggttgcaacaatccttaaagacacataatcctaagtttccatatttttttttttgagatggagtctcactctgttgccaggctgcagtgcagtggcgcaatctcagctcactgcaatctccatctcctgggttcaagagactctcctgctcagcctcatgagtagctgggactacaggcatgcgccaacacacctggctaatttttgtatttttagtagagccggggtttcactatgttggacaggatggtctcgatctcttgaccttgtgatccacccgcctcggcctcccaaagtgctgggattagaagtgtgaggcaccgcacttggccaagtttctatactttaatgagtgaagaaatggatgaattcaaatatattggtaatgacagagataataaacatagttgcataatcaaaccactgtctccaacggccagttgctagaagtaggaaagacatctaagtgaaggaagacagagcaatcagattctgaccttccatattttgcaacttatttttttattcattcaatataaacttagtaagctcctactatggtccaggccctgtgttttgcttttatatcagaatctcggtcatcaagatgcttatagcttcatggaggagagatgtaggaaaataaaaaagcctgctaaagcacacggataacagagggttttcacagaaatatataaaaaatgttgtggggacagagatatgaactcacctcgttcatatccaggtgagtaagtcaacagtgatgaggaatacgagaaagtcccagtagattttggcggcaacaaattattagcaataaaaatataagaactagtctttggctctgtagagtgaagagaaggacaattttgaggaaaaaggaagaaactccgtgagagtacttagtattaggttggtgcaaaagtaattgcggttttgccactaaaataatggcaaaagtaatggcaaaaccacagttacatttgcatcaacctaatatgctggattaaagtttgatgctggaatttcctctttcctgggtctcttaagtcacaacagatgtggaatcatagcaaaaactctgtaaccaaacttaacgcataagaccaacgcacaattacagacaagagtaatcagaggacagacacaaaagggtggaagtttacatatttctcactcccgcaggcagtgttctgttgacaatttctaactctgttttgattctgtagtgacaatagctgcttccccacccccccccctttttttttttgagacagggtctcactgtgtcacctaggctggagtgccgtggaatgatcacagctcactgcagtctcaacctcctgggctcaagtgattctcccacctcagcctcccaagtagctgggactacaggcatgcaccaccatgcccggctaatttttttattgttttgtagagatgggatttcgccgtgttgcccaggctggtctaaaactcctgagctcaagtgatctgcctgccttggcctctcaaagtgctgggattacagatgtgagccaccagcctgcttccccttttatttgtcctttttataactgcagttgctccatgtggaatgtgatggcaaagggtgtccataaatgggcaacttcacaagggtggttaggaatatagtaacttcagattagtcaacaaggaggaatttacatatatttatgctcaaatgaaagaatgaaaatgttgccaaattctttccttgagtatttctttcatttactatattcctttaactgtatgagtttatgttttactgttttctacataaaactcaagactttgtctttcattgtcaacattgctaaaaacaggaatattgctgagcggtatttgggttttcctgccctggcctggtttctgagatgactcttcagactcagttcatgtgggctgtatgtataaaaggagcttggctaataatgaaataactgtcctaattaactaagcctgaagaagcaattatctcagcctacagagcgggctacctttgacctcattcaaaagactcagcagatggtgggttctgggaggtttgaggtgggttctgggaggtttgaggctctttagaacttcaaatggaaagcttgttgaaagtgaagagttagctttggtgtctttttttttttttgagatggagtctcgctctgtccccagactggagtgcagtggcgcaatctcggctcactgcaacctctacctcccgggttcaagcgattctcctgcctcagcctcctgagtagctggaactacaggtggcgccaccacgcctggctaattcttgtatttttagtagagacagtgtttcaccatgttggccaggatggcctggatctctggacctcgtgatctacccgccttggcctcccaaagtgctgggattacaggcgtgagccaccgtgcctagccagctttggtgtctttatccctgcacttaccaaccagacgccttcaggggcctcccaaggcaggagaaggcactgtgtttgaggcggtaggcacactctctgatgacttggtttatagactcccttgaccatttgtggctgctaagatttattcacagtttccgccttttgacctcagaggaagtaaatattttcctcaagcggattgctgctcactggccccctttgtgcttctatcccctctcaggggtcctcattcatttcttcctctctcaggtggcccttcatctattcattgttggctgccattgttacgtgggactcagagaatgatcctaggcagatgcacagtccagtattctggatgtaatgatattttcccaacctcattaccattccagcacaattttaaaaacaaagaaacaagcaaacgtatttgccatcactccttctaatcggtctgatatcagtttaatacactgttataaataagtatataaataaatactataaatacaccctataaataaacacacaaaataagccagactgcttttcaggcaggagcctggtacattgcaaaaataagcaaaataaaatagcttcaataatcttctggaatgaattgattttctttccccccggcaagtggctatgtgtacagctgcctacgtgtggaatagtcacttggtggatcattggctgagagggtcagtgtacttgtctctgaaagcccgtttcttgaactgacatataagaaagaaaatgtaagagaagcttcaaagctaaggtaatgagggtgacctagttgggaaaagtgctaaaatatctccagtgtataaaacctctttaattctcaccaacgataagacaagtcatttggagttctgagtacttccaattagcaagtgagagactctgattgaaaaacggggcccactgcatggcagagtgtgctttggctctttattttgataagtggttttaagtatttattataataatccatagcctaccgactaatgggctgtagtatgtcttttaactgcgataaagtcttgagaaaatgagacctcactgtaagcgcttgcagttaaatcttggtcgggaagtagaatgaggccactttttttgatcacaatgatcatgtgttctgattaatgaagtgaaaaatagatcattttactatgtggaaattacaatgccccttgcataatactacaaacaaaagacattaattgctattaatggccttgatgtctatcctgaagcatcacatttaattgctttacttagttgccttattcaattatttggatttttcttttattatggaagaacaactccccatattttatgtctaggccttctaacatcagaagtggagttagatttccaatgctgctgcttctgctgccctgttctgtaatgttggaatcctatctactacttacccctctttggttcttttcttcacggctcacaagtggctgcatgttgaggctggtgggatgacatactgatgagttcctggttttgtaccaatcattatcacctcttcaagttttacttaacctaccaccttggcattgactcagtatagcttgcggatgaagttgctcttgtgaaaggcgttgaggaactcctcagcagatgctaacaatctgttaatgactttcctaatgtgtagacccaagctgaacaaacatgaaggcaaatttctgggcctcgatgtgttcgctcagactgtacaggagcctttgtaatttgatgttaccagttccttggtcaagacaaggaggcagttattatctatgcctcttagcagctgaccttcaactgtaagagaccattctggatgtagcaagttcctaaatgacatattgctattccttttagctatcaagatgcttggcagaattttttgtctctagaaattaccatgggatctacaagcactgaagaccagttttattagtagacttttgtggagtgttgctggaattagtgatggtatcttaagtcacaactgggtctttgaatactgactgcttctttggcttcgggtaccccaaatcctccaagctcttcttgatttggtggatcttttggaaaaacttctttggtttgtctacttttgccatactcaactctcaggttttcatagccttttatctttgaagaccccactgaagataatgcagtcccctgttgtattagtccgtttttacgctgctgatagacatacccgagactggataacctataaagaaaaagaggtttaatggactcaacagttccacgtggctggggaggtctgacaatcacagtggaaggcgaaaggcatgtcttccatggcagcagacaagagagaatgagagccaagtgaaaggggaaaccccttatcaaaccatcagatcttgtgaggcttgttcactaccacaagaaaagtatgggggaaactgctcccaagattcaattatctcctgccaggtccctcccacaacacgtggaaattatgggggctacaattccaggtgagattggggtggggacacagccaaaccatatcacctgtgatctccagagacttccagggcgtggctcatttccactgacacatttacagagatgttgttagtggtgtcataccaaacatagctgccttttttttttttttttaagacggagtctcgctctgtcgcccaggctggagtgcagtggcgcaatctcggctcactgcaagctccgcctcccaggttcaccccattctcctgcctcagcctctccaagtagctgggactacaggtgcccgccaccgcgcccggctaatattttgtatttttagtagagacgggctttcaccgtgttagccaggatggtctcgatctcctgacctcatgatcctctgcctcggcctcccaaagtgctgtgattacaaccatgagccaccgcgcccagccaaacatacctgactttctctttgcctttcttctgctggactcccaccttgtcctgtagctattctagggttctagagaaattttatacaagggacagtctttgctcctggctatgacttcttccccagatccgtcttgtgctcctctctagtaaacttgaccgtaccatgaagaagcacaaatgatgaccctatgatctcacctcgtctggtaaagcccagcgacagtccagcctgcacctttcttcttctccacctggacctctttgattctcctgagctgtggactttctaatctgaaaatcctaccaacctaccttctaaaattccagagggagatgactcaagatagtgtctatgcaattttcttctggtttttctttagtgaccaaagctgtaggttagttatttaagttatactttatgccctgaatagacatattggcaaatgaaaatgttacctgtccagactttccagcttccctccagcaggtcttgtcacttggtcttttttctttccatcatgcggaaggcttgttcttccaacagtttcttgcctgcttcaccttgggactcactgtgtgcctttagaacttgtctaatcagaaattagattgctattcttggccagaaagcagagccagagaaattcggacctagcctcattagaacaggactttaatcagttgagcctaccagccacacacaggctaaacatatatattctatataaataactacacaaacatatttatatatctttttaatgtgtgtgtatgcactgaagtttgcaaagaactgggatagaaaagcaaatgcatatgatgattaatgaaaccagaattttaagtggttccttgttgtatatttgctgacaacatattattttcctttttggagtggagtgtgtaaacctctgggcaggaaagaactatgaattattctttcccttctaatctacataaataagagattctaaaactgtgcttttagccatttaccatgcaaatagtcaccagggatagaactgttgtagatctagaatatttatttaatggcagctgctacaggacacatgctttttgagttcaatggcctagaatctcctcacccttaccaacccctcccttttaaggttcatttcttgtgagtagcctaagatctgccttgtaatcatgcaaaaggatttatttcaattataagaaatttcatctcttccctgtgccttttaggagctccttagactgtctgaaatactccatccggactcatgataatagctccagatttatgcgttataactgggtgtcttcatttttttccatatcagcaatgtagatcaaccttttttttctaacatataaaaatcgatttagtaggcccttactttgcttttggtggggagttttaatctcttattatagaccttatttcccaaacaaaggcacaaacaaagaggaaaaaaacaaggttaatagttttctttatcactggactctatccccctacccaccaataacacttaactggaaccctgtctgtttccttcaatgacctttgcttatgttagttctctgagacaagaaaatgtgtggacgcgctaatagacaatttactttttgtttgcaaaaacaattcagttgcccaacacgggactgtgttgtagctgtggtgattagcaggcagggtggataaagcttcgagaacattattcaatgcctaaatgaaggtcacattcccagtgctagttttagtgtgcatgcaaatgatggcaattgctgggctgttcactctcacacaagcaaggctttgttaaatatgataatcagtcagctgggaaggtaaaagtttcctgcaaataatattgaaacatttaaaattgcattgttatggaaaaagagaccactctcattcattcaagtagtatttaactagagacaaaataaaaatgattgtagaaatcaggttggaactcttgattatttaaagtaataatgagggacctactcattgaactacttaatttacccaaagaagagtgttgaggtttcaaaggcaaaacttaaaaaaagtcaaaaaaagaaatgagatgtatggcaatgtatttatttctgggagagaatgttttagtaacagggagctgtgaggtgggggagaagtggttggaattataataatcagcttggtttattgaatcacaataatgaatctctccctttgtcgacgtatggctagttatcctcagattatcttaatgatatcaggcagagtgtgccgttgatccgtgcttgaaaagtaaaaatagttgacagtcaaactgatctaatcttgaatgctgtttgtgacagagggaacgattttgtgaaaaaagacgaggtggtttttatgtcgtgcaaaaggctgaaataatgctttacattattgctgatatcagttccatttaaaaagtttaacaaagtgagttgtgtttaaatgattcctctggggtgcgctcctattaactctattaaatagcatagatacttctggaagaaggctgtttgtactctatgcactggcagaagtgaagttaatttctgcaccataatctcacacttctcctgacaaacacacaaacacctaatgaccaccagccaaagtctagcaaaccaaaacctagtcccagatactgcacagataacatggctgaatctacaggagatgtattttaaatcacaatcttagggtgagaatattagcaagttgtagacagagacactttaattttcccttctcatatttacagaggcttatagagcacctttcttaagataggcatgttaagggaatgaatatgtgaatgattgcatgcctgcatgacggaagccattctggaggattggaccagggacacatcttgaagggactcttggtattttaacgtgggtgggatgtgattcaaagaaatattaaatactcttgctaaaatggagccaataataataataatacaaataacatggagctaataatattacagtagctagctagctagtcaggcatgagcaaggcaggagagggctcctctgtgcccatcaggaatgtcaggtgactatcaggtatggtcaggtggttgttaactgtctctgtaaaatagtaattggtcacagctggcaccaagaaaggccgtctcccgatagatagaaacgcctgaaactggtgatcagcagcttcccagtaagatctcatgagctgggcaagtgggttcaagcatgcacattaagaggcagaatattcctagaatgttccttctagaacattcagctggtaagggaagaagaactcctcaagtaagcatgtgtacaactccagtaaacaccacacttgcggtcactcccaagtgctagcaggctaccgcgcatgcagacagcccaccccaggggatgaatcaggggagaagagatgcaagaccccgcaagtatttcaacttataaaaccccatgtcaaaggttaaacagggcatttgatctctcaagttgcctgcttggccctcttccaagtgtactttactttcttttgttcctgatccaaactttttaataaactttctcccctgctctaaacttacctctatctctccttctgccttctgcccctcattcaaattctttcttctgaggaggcaacaggttgcttcaggccctcgtggatctgccactgctaacctgctttggtaccgtgcaactcagatgctttctgctgctaacaatagtagcagcttcttcacaggggtttgtgaagaatgcatataaagctcatatatacattcctggcacattgtagaagctatagaagtgttggttattgttattttattatattgaagaggaaaaattagctccagtgaagggccttagaaagggagagcgtgaagtttctattcctctgtcaagaagatggtatctgccaaattctgacttttctgggcctcgagtgggcactttcgcccttttttcataaaaataactaagctaatattatattttatgattatgttgatataaagatgaacacaattcaggctggatttattatcatatatttattgttattaatatttttcttctgacttaaataaaattaaaatatttttgtggattcctaatgttctgtgggccataggcactgtgtctactgtaactggctaggggtctggggtagggctgggagtgaggttgctggagagaaagaggtagaccaggaagacagtcttcattgcatgtagtggcttagaatctaggctctgggttcaattccaggctctaccacttactgatttttgtgactttggataatttatttaacatctaaactttaaaatttcctcatctacaaagtgggataaaaacaataatacatactcacagggctatttgtaacatcagaatgcaattatttatataaagcacttagtatgatttctggtacacagtgaacatacaatgactatgagcatgacttttagctctatgtgtttctgggttttaaccaccagtgtctcctccccactctgctcgcattgcatttttcgtggcggtaaattccaaccttctgtggatttagggtcatggcccagagttttcataacttagcaatgattcctgccattgttcagaagtttttgaaagtccaaagagacagggcttgattcaagagctcaaagtgtttatacatctttctggggcttttctctacccttcaatctttatacatcttcatatcatttacagaattcttccctgtgctttgtatccagtggaaactcattaaatcatacctgctaaattgaagtgacctggggcaacagaacatttgaagtaacattaggaacccaatactgccccacaaagctctatgtctatatggagtggggccctcttgactgcacaataaaaatgttatacagaaatactaggattttgatatttgaattcaaacccatgattgagacaggaaagaaagaggagaagattcccatgataactcatcttagggcagaaacgcctctgtcaacaagtgcaaaatgtaggaattatctggaggtttactttctgatttacttgtttcagaaccggcctccttttcctggaaagattgtccatctgagcccactagttctgttaaaatacacacggaggggaaacaaggattagtcaacccgattagccaaatcaaccctgatggcaaatgaagcaatagacaacactgccaatggtcacaccaatattgtactatcccattggcaagaagacagatttccctcccagggttcatatgaaaacataaaaaccagagataattttttttttaaaaacttaattataacagttttactcttctcttttgctgatttttttttttttaaaaacctgttccaaggaggaaaaggatttcattggaatcacatagtgagacaatttaccttgtcgaataaaattgccaaaagttagcaagcaaagaaacaaaggatgtcaataatgatcaaactcaatgatcaacttcagagtcatagcgggttacttgcaatccccctattgtttttttagacaacgggttaaattttcttgcagtgtcttgcaatgaatcttgtatattttgccagtacttaaaaaattaagagatcagaatgccgtggttattatactgctgggtgagattttttgccctgtgaagaggtgcctgctgcaccttctgttatgattgtaagtttcctgaggcctccccagccatgtggaattgtgagtcgattaaacctctttcctttataaattatccagtctcagggaagttctctacagcagtgtgaaaatggaccaatacagatgttttcaagatgacttaagaaagcttgtcattaatgtgcctatgctgttatcagcatccatggtatcatcctagccttaatttgtctcctattgtgatggttcctcagtgtcctttgctgtcactcatctctacataacccttggctattggattccctggggagtcttttctaagcacttttgtcctctcaccccacatgctttcctctaaggtctcatgcattcccatgctgtatggtttctacaactttatccttaacccaggcctctctctggagtaccaggctagaatatccaattgtctatttcacatttccatttagaatgtttccagataactcaaatttaacccatcccaaacttgattcattttcttctcttctcctttccccttcaaaaactgctctttttccagttactcttgtttcagggattggtaatcaccatcctcccacttgtcaatcatctgggttgtcacccttgaccattccctctctttctcttgcagccaaacaccactgttgttggctttgccttctagacagctctgccatacatccacttgtttttgttcccactgccacaatcttactccatgctaccactgcttctctcccagatgacttgcaatggcctaataattagactcctggtgaccattttaacccactcccttctgtaaaggagaccatgcagaagtagagtaatttttctttgaaaactcaattctgatcatacatctcctgacctccatggcaattagcagtgtgggacactcagtattcctgccccacaaaactgtccaccttcttcaaatgctctgctttttgttcacttggtgtagccatcaagtcttccttcagtttcctgaacatgctgtgttgtcttgcagaaacataggtgtccctatttatcacttaactactgggcatctttacatcttaaaggtgactttcctgataggacttttctgaactccctttgtttactccctatcggatcctgtattttcccacttggtaggaattgtaattatttgtttaatgccagttctgttaagaaaggatcatttctatccccagaaattagaaccaggtcaggcatgtagcagtagctcaatacatctgtgaaatgaatgaaagaataaataaataaataaaataaataaataaaggaaatgagaaatattgcttgagttttggaaaagacagtggagcatcctgcacttaaatataaggccacctgtatatctatatatctcttcagttgaatgaatgccaaaataagaatttccattttagggcaaaaaaattactgcaagtcagtaaggtctagtggaatgagtttgtctagttgtcaggagacctgggtcccattggcaagaactagctgtgatcttggttaagtcacaaaactttttttaatgcttggtacctgaaatttaaaatggaaataaaatagttatcaccttagaatttgaaataaacttacagttataacagtactttatttatttatttatttagacagagcctcactctgttgccctcgctcttgtttcagggattggtaatcaccatcctcccacttgtcaatcatctgggttgtcacccttgaccattccctctctttctcttgcagccaaacaccactgttgttggctttgccttctagacagctctgccatacatccacttgtttttgttcccactgccacaatcttactccatgctaccactgcttctctcccagatgacttgcaatggcctaataattagactcctaataattagactcctggctggagtgcagtggcacaatcttggctcactgcaacctctgccttctgggttcaagaaattcttcctgcctcagcctcccgtgtagctggaattacaggctaccaccaccacgcccagctaatttctgtatttttagtaaagacagggtttctccatgttggccaggctggtctcgaactcctgacctcaggtgatccgtccgcctcggcctcccagagtgctgggattacaggcctgagccactgtgcccgggctgcttcccaattttcaagactcatctgatgtccctcacttcatcttgtactttgccagattactctgggagttcacactgagcttccttttggtgatattttaaggcacttaaaattcaccaaattcttcatctaactgatatattttgagaactaattgttcctgtgctagtcttacttcttcaaatagattctaagttccctaaagtatggaaatctggtttatcatatttccatatgccctcagtatctgacacatgttgagttcagagtaggtgcacaagaattgaggggagaagtctggaagggatggacatttaggaagatggaggatctgtaaaaccctcttgtccatttttcaccagttgtccttgttttcaccagtttttatttcatcaaatatcccccctagatttaaaactctctgtttagctcttttaaatccaataaaacactaaacagaggataaatttagctcctggtagagggtctgcaaatgcagatgtagagcatgtgggaagatttccaggagctttagcagaaagtaccatatattgggcattagctttggaggctgattataaaagtcattttctgtttgtgattttgtaatcttactctcaggtgagctgtggtcattgctgacaggcaggtccatgcacaacaaccgtatcatggtgccttttttcatcaatcatgaatatttttgtgggggggggctttttttttaaagaaatcaattgaaagaaaaggtaaaataggatgatctgtgctagtttgagaaacagattaaagaatactagaatactttcaaaaatttattcaaagagattctaagaagaagacaaaaaggtttctcttttcttgttgtaaagattctaaactcctttgggaggctgaggcgggtggattacctgaggtcaggagtttgagaccagcctgaccaacatggtgaaaccccgtctctactaaaatacaaaaaaattaggtgggcatggtggtgggtgcctgtaatctcagctacttgggaggctgaggcaggagaatcacttgaacccaggaggcggaggttgcaatgagctgtgatcgcgccattgcaccccagcctgggcaacaagagagaagctctgtctcaaaaaaccaaaccaaaccaaacaaacaaacaaacaaaaatattctaaactcaccaaggcattatcttgagggctgctctcataagacagaaggatgcccctggacacctgtgaagtgtatgggtgtgtgtgtgtgtgaatgtgtttgtgttgaaagtgttttgggggaacagggcctagaatggggaagcctgggaatagtagaatccaactaccatggccgtttgttatttcactgttgagaaaccttctacctgtaataagatggttattaaaattttaatcagaacttttctgtgcacctgagggccaggtcaccgagtttgcagctcaagtatgtaattcccatataaaggactttaattaaaaataataatgatagtgttattttcaatttctgaaatcttgatcgtgttttcatttgtctgatctcattttgattttcattctcttaacaagcccatgaagcaagtaggcaagaattactaccttcaggaaccgcaatccattctatttgtgaaaattttcccttggtgatccatttcatagtgtatcacaaattccatctcctcttttctatacctgtctagaaatatcaatacatgtaaactacacatcttttaaataacactgtgttatatgtgaaagcgtaattaacataaaagaatatattttacatacatcaagcatagctagaggtctctcttggcagactgagaggcaaatgatgtgctctggggttgcctgtcattcatctgtgaaacccaaagggccttcttgagatctgacccaaggtgatgttttgtccctgtccacataaaaagatgctaaaattgctgttgctaaagacgaaaagagtaatctcacatagggcacctaattatatcaatatgatgactgtggactgtatatggacactgagaattcctagggagcccacatatacaaacccactcatcaccacccaggagacgtcagggtgtggtctgctttaaggagcagtcttcctgttatagtagcctactctgaatgtgcccccttgggttctctcccaaatacgctgaacatctagtcatggatacatctcccctgcccttggacaccatgtgctcagctttctggatgcaggaagtaagccatctctgagtacctgctgcgtctctggcactaccaattagggttctgtgtgcttgtgctgtgatggaagagggatgtagaagctacgggtagggcctgtgtcagtggctgttcagtcaccttctgttgattcctgatgcctgagcaacagtcccttgttggcgcatctagaggtctaggagtccttcatgagtttgctttaactccaaacccttccttcttatccttttcctgggctgtacagagactcgttaccattttatcctctacagtcctttctgtttacttagttctacaactgcctcatctcactgtgttcttgtagtataactgtggggctcttccccttttagttaagaaagaagcaagacctggagagaataacatgctcaattatggagccaggactttacataggtctgtctaaggccaaaatggatgcttttaaccatagtccccaaagattatttctctttcaagaagactgcctcttatgtatggcaagggggagagagtaatagtatctattccttcttcagggaggaacatggtggagagacagaacgttattatttttgtttgtttgtttggttggttggaaggaattcaaatatgtgtttgttccagagagtggcctgagaacagaggcctgctgtcaactagaatactgagtgaggaagtctggaaagacctaataatccttatcttgggcagttagacataaattacaggaactgtaggttctgcaattctcaacttatggatggcttgttttgcttgttggtgggcaggggagagtgcattgagttgcaaagtgagtggtagagttaaagtgtattaattttaagtccattcacatgttgtctaactagtgtctataagattagctggaagaaccctaagaaatctagtgtttaagtttaaggagtgtcaacaaaatggtcttcaaggaaaagacaccagacgaacccaggactgtgctcagctaggactcagttgttcgtgcctagaggggttaggaggcatcttttacttcagtttctatttgcctgagttttaatttttttcactgaaataagtagaaggacaggttggggcttcaggagtaggatgacagctatatttttatgaggttttgttgaaattagcgtctacatttcaatagctctacgttcccacctgcttgatggcggcactaaagggagcccctcaaaacctcctctgctattccaggcattccaaggtggccttgcaggacagcaaggaagaaatttgctcctggactatgatttcaacctcgcctgctgtccattgcctgtcatgaagaaggcatcgtgatgaggtattgctttcacaccctctgagagaataggactgccacatactaccataagcttgatggcttaaaacaacagaaatgcattctctcatggttctggaagtgagaagtcctaaatcaaggtgtctgcagggccacactccctctgagggctctaggggagaatctttccttgccccctccagcttctgatggctcctggtgtttcttgcttgtggtagcatcactccaatctctgtcttcatcttcagcattgctctaatctctgtctccatcttcctatggccttcttccttcctgtgtctagaatctctttctcctttctcttgtaaggacaccagtcattggatttagggtgcaactgaaatccaggatgatctcattctaagatccttaactatatctgtgaagacctacaaaagacctattttcatatggtcacattcatgtgtactggaggttagcaattggatatatctttaaaaattatttatttttaatgtttgtgtgtacatagtatgtgtgtgtatatatatatatatatatatatatggtatatgagatattttgatacaggtatgcaatgtgtaacaatcacatccgagtaaatagggtatccattgcctcaagcatttgtcctttctttgtgttacagacaatccaattatacttagttattttcaaatgtacagtaaaatattgttgactgtagttagcctgtggtactatcaaatactagatcttattcgttctatctaattatatttttatacccattaaccatccccactccttaccccagctacccttgccagtctctggtaaccatcattctactctctatctctatgagatcaatttaaaaaaaatttttagctctcacaaataagtgagaacattcgaagtttgtctttctacgcctggcttatttcatttaacataatgacctccagttccatctatgttgttatgagtgataggatctcatttttttatgactgaatagtactccattgggtatatgcaccgcattttctttattcatttgtctattgatcagcacttacattgctttggatatatcttttgagaagacaccattcatcccattgtagggacaaaggcaactggagaaaagagaaagaagagaataaataagggtacggaaggagtgggggcacttgtgtcctactccctttctagagtatggcagagccaattctcaaccctagtaagggagtaggttaagtcagaagcctaaggacttgcgaatccagcatgaacagagcaacttcagggcttaagtggaaaaggtgactgcgaccatgatcctagtattattgaggcggcctgtgaccttggggtggctaccaaatagtacccaaagttgtagtggagagatccatgacccctattctctcagaggatctgaaagccatggagcaatatctcatcaaggtgccttctgtggtacaggcagtggacagcagatgaggttgaaatcaaagtccaggagcagatttcctccttgctgtcctgcaaagccaccctggaatgcctggaatagcagaggaggctctgaggggctcccttcagcactgccatcaagcaggtgggaacttagagctattgaaattgagacactatttttaataaaaccatatccgttctcctacactgcagaagcctgggaggatctgcttataaaggtacaagaaagattaaaagcacgtccacatcatgtgtgcagaagcatgcgctgagttgctgctggttgtgagcttgaagctcacaaaaatgaggttccaattttgcctcatttggaaaatcaggaggaaacagcctctgaagcctgtggttagagttgggctaaacataattgtcaggagcccgggagaatgtggatggtggtggaatttgagggattgattggaggaagagataaaaaaatattaaaaaggaaaaaaaaagaaaaatagaaaataattttagaaataacaatattccatggtcttttctaatgtgctactgagcaaaaattcctgctaaccaatacgctaatgaattgcctgggacatagggagcacattgcgaaggtaacactagggtctgtgttccttgggctggtaccaaccaggaaaaaatgaagaaagagccgcagtgtctggctaaccagcttggtctatgggggtctttcctcaaggggagtctttcctcaagggctgccatgaatggccgaagactgagggaaaacctttctgaactggggacacattcccccataggtgctcagtactctccctgaaggctggcctcctccaaccccaccctgtctgcaaccttgggtgtattctttattctttttttcaagcgggaaagagacacagaaacaattggcttgttaagttgaaaaaacaggaaacactggtgtggtggggttctctctctctctgtctttctctctctctttttttaatgctttcactttttagaagagataagcaaaagatctgtgggcccaaagagagggtgctagtggggttcagaaaaatgcttccccttggggaggaatgaaattggcttggtcccttctcaacgacctcctgtccatacccgaggcaaaaaagtcagcacacacccatggctgatgtggggagccacagggcccctgtagagagattctggctcagggttactgtctctgctgccctcctgtggcagctgggaattcaggaattgctttttaaatgatggaggatattgttaggttcaagaaaatgtttctgggaataaatgagcccatttaccgcaggccctgcaggggcagcagagagcaggccgcaggcagggcagcctgggcagctctgcgccatggcatcccctattgctcctccagatggtgggagcctgggcgctcttcaaagaaaacaatgaagagcacagaataggggtcactatagcggactagggaagtttggatagacccgtgaccactctgtccaaactttgtagctccctctgctgttttctggaagctctgagaaggcggtgcctacagttcacaactccaaaagcacccaacacattgttatcacaataatttatagccaggatgcctcttccacctgagagtgagctgcctgagccctcaggtttatgtctccagccccgaacacaattccaggcacaaaggaagttctcaataaatacttgtgaaatgaaaaaattggcagcccattttaggttctacaatatctctccatcattcatgatcagaagttctttcaaatatccagagtatgacatgggtaagtaggatggaaggaataaaaatgaccaacccagataggctgagaaaaagtagagtcagacctgagtattttagtgccctttcatagcaagggagctgggcagaggttatcacattctggctcttaatgtactaccaagcaaagaagactttagtggggtaaatggggagaggttacagtaataataattcatgtaattggtaaaattcttcccattttacataggaagcacatgatacatccttgcgataaagggtcagccacaaagccaccaatcccatctttccttatggagaggagcccaagatgctgtcatggtgaatggaatgatattgacccattatagattttaccatatgaagagagatcacaggcaaagataatgaaagactcttttgcaagaagccacaaggcatctgttgggttcaattctcaggtcactctatgcagactgacagtcatgctgaggagagaatgggagtaggctgcttaaaatgttctgtgtgtccaggataacctttgcttggcgtcctatctttgccacattatccatttaaaatttttattttattatcaatatttctcctatgaaaacacgttttttggttcttcattatgcataaaaagatgtggctcttaggttttttttgtttttgtttttgtttttttttttttgagacagagactcactctgtcgcccaggctggagtgcagtggcaccatctcggctcactgcaacctccacctccggagttcaagcaattctccttcctcagcctcccgagtagctgggattacaggcgtgtgccaccacacccagctaatttttgtagttttagtagaaacggggtttcaccatgttggccaggctggtctcgatctcctgaccttgtgatccgcccacctcagcctcccaaagtgctgggattggctctaagtttgaaacttttcttatttccctttctttctctgaaaagatcctactgacacagaaatattctctgtcacacttgtcatttgtggcttcccccacccccttggcacatatctgcctcattagcttcacatttcttttgaggactcagcttgagatgatcttttccttcctcgcctagcaccagttcatttttccctgatgactattattatttgtttaacctagagtcatatttttgggcacattttgcaaggatgatgctataatgtataaaaacatgtaatgccatattcaaaagtcacagataaataactctttaggtgatgggtgaaactggagatgcttttgacttaatgttctcagagtagaaaaataaatgggaatgtcataccatgcatttttattaagcaaatgatgaaagcaaaatgaaacataatgtccttaatagtatttccaacaacgctgaaaagcagaaacttgggcatttcccaagctattgatgtatcttgcctttaggctctgttcattagtcatttgtaatgcctatttatatagatcttttattttattttgatttgcaatttaacaaccagagccagtgaagattctgttctctagaacaccagctgggtttcctttccactaaaagggcatagtgttctgggagatcaggcatctagcatgaaaatgttctttctttgtggaaactgtctaaatttgaaagtaaattttttaaagtagcaatttgttgtagcagggacaatggctcatcatcacttactgaagattaggagtaggagaaatgtgaggtgttattttctgaagagactggaagaagataaaccttcccaaaggtgctctgtccctttcatgttcaaggaaagaaggcaattttgtttagtgggtaagaaccataaagaatcataatggtggctgggcatggtggctgacatctgtaatcccagcactttgggaggccgaggtgggtggatcacctgaagtcgggagttggagaccagcttggccaacatggtgaaaccctgtctctactgaaaatacaaaaaatacacaaatgagctgggcatggtgatgcatgcctgtagtagctactcgggaggttgaggcaggagaatggcgtgaacctgggaggcagagcttgcagtgagccgagatcgtgccactgcactccagcctgggcaacagagcgagactctgtctcaaaaaaaagaatcataatggtgccactctcaagtcctaggtatgtcccacactgcctctgcgggacttttttagcaattatttctcactttctgcttctcaatgaggaaacggagaagtgaagagactgagaactacttctctctataattggtagggctgtcctcttcagtgacaagtcaacactgacaatattttatgtgtggcacagaattatggaaccagagaatgaaataattaatatatagctcaaaggcagaataacccttcagtcattccaggcaaaaacaactgcatcttacattcaaagactgagaaaaaataaactccatagtggggtgcctggggaagaagaaataacattttcaaatatatagacagagaattgcctttttagggtggaagttaccggtaatttaagttcctgtagaaaataacctacaatctttcgaagctgaatgtcttctttaaaggggtcgtttaagctctgtaaatggaagactagtagttatctatgattcttaggaggaaaccttgacatttccatctgttgccatccagattctgctgtttgctcatgtaaattgagtattttttatctgggctatgttgtaaaggtgacttttagaagttgtctcctccttccattagcttattttacttattgtctcccacatgggactatgaatggttgaacagtctacactgtttttttggttttgttttttgagcagctcaaaaaattaagttgtggactaaaaataaagaaagctattccacgaatggttgaatgtaggggctgggattgagccatttcctataagggagtgaataccctgggggttcccgaggcttccttttacgtcttttcttgtttttctggagagttaagagagaaaactatgtccaggcttgaagaatattagtggggaagatttggttctgggctcaaggtatggtgatgctagaagctggtatgaccaaccaccagagtaaaaaatattgactcggaagtgcacagagtctgggtaatactggaagtatgtggtgtgtgtgtgtgtatctgtgtgtttttggaggggagaactatgggtcaaaatcagcaggcattaatagggatttgggatactggcatttcctgacaaaattaacccccaaagacctgctggattaggtcagccaatgtgagtcctccttggaaatattgggggaggagtagctttccaaatttcatcgaatggtaactcaggatcaaaactcactgatatctgaggctgtgtctataaccagattacatgactgtgcacacagaagaataggaattcaacaaattgtagatgctttgggctatagaagaaaactgtaatgagactgaaaatgatggactctcacaatctgtggccctaaatccctggcaggtagagtgtatttagcaaaatacttgaggtgtgataagttttgtttgcttattttttctcaatttatttcatcttttaacttccactgcctgtaattcagtcagattattggcgcctggcttattgcctaaggggagagacgaagaggtaagtgtttcaaaagtgtaatgccttaggtaattccagaggatttgaggcaaagacaaaatgttatgaggattatcagttagcttttctgtaggaccaactgctcccaaatggagtgcataacacaaacattatttaccgttgcccgagttctgctgaactgagacagccttagttgactgtgtctgagctagctcgtgggtcttcattacagttcatggcctccctcctatgcctagggattgtctaggagttggctggggccatgaggaaacgtggtcctgtgcctccatcatccagcgagctaaccttggcttcttcacatggtggctgcaagatttcaagagtgggcagatgtgcaacgctccctcaggcctgtatcccaacaggcactgcatcagttctgccactttctattgaccaaagaaagtctcaagggcaccccagattcgagtggagaaaaacctttcactttgatgggaggagctatgaagacacattgcaaatgggcaggaaagggtgaggaattgcagctatctttgcaatttgtcacacatatcacgaaggaatggggaacatggacactgacagcaggacggtagccttctctgtagccactcacatgacaaaatattggccttacagttcccattctgggaaaatgaagaacccagatggttagtaatgattgtagtgattagaacaatggttttggggcatagtccacagtaggaaaaatgcaaaacactacattgatttgtggggccagagagagaagggtgccctgatgaggcagaagctcccagagagagaatggctgtaatgtaaggccagacaagtagcccacagatagataacagaaattgctagttaccagccaaccacagcaagcaatggaatgagttctgtgccttcaggtatggcagggaaccagcagagagcctgagtcatcaagcctaaatgaagctctgtggataagagtgacagccatcttgaagcctcttggatggattcaccgctagggacacagagacttcccctgcccttgtcaccccaacacttcagcaccaagtaagtcaccccaccaacataaacatagtaacaagtatggaaggtaagggagaagagatatcctgaggttatatttttgaaatcccaggagaatataagctcaaaaagaaaaaaaagaaaacaaacaaaaaaaaaaacgaagaaaaaccacacaaaacaaaacaaaaaacaaccagccaagcatggtggttcactcctgtaatcccagcactttgggaagctgaggagggtggatcatctgaggtcaggaattcgagaccagcctggccaacatggtgaaaacctgtctctgctaaagaaaaaaaaaaaaaaaaattagctagcatggtggtgcgcacctgtaatcccagctacttaagaggctgaggtgggagaatcacttgaacctgggaggcagaggttgcagtgagccgagtgtgccactgcactacagcctgggcaacaaaagtgaaactctgtctcaaaacaaacaaacaaacaacaaaaacaaaaacaaccaaaataagatgaagtacagaaaaatttttaaagcgtgtgtattcttttcaatggttgaatttggtggtcgtgattcagctcatttcctgtagaggaggtaagagaacacgtatgcaacttcccaagagtttttaatgactctcttatttttattaagatgttaggacagggcactatgtggaaagccccttatctggggctctagagcaggaggagtgaacagcctaatgtgaccaggtttcttgggcataagaatagcttcatggctccaagtctgatcatttgtgcataggtcagtatattgtgaccaatctccttaaaggctgttcatcccgtggtagaaataataaagtatccaacactgagagtgttctcgacattgttactccagccttgggaagaggtcttcgatgcatggctgaggccaattgcacctgggtgaaagtggcaggtgcaaaatgaaagtgaggagggttgtgacaaagtgtctcagaggtgccatgtttgaacccgttcactctcaaggtgaacaatgcttcgacaccgaggccaagtgtttacagaatgttgaactaccgctgggaatgttgggaatttcttgctatttttcactgagtgggagcccaagtgtctgcgtttgtgttcaggctaaagacattgctgtagaactcggagaaaatggagtgggagatcaaggaaactgatcagcctctcccagaaagtgaaagcaggggatgtactaaaaatgctctgatggaccctatgtttcctagattcttccagttactggtctggcaaagggaggtggtggtttgaattaatgagaaggggttactgggatgaaaacaaggtcttttatccttactgtaactatagagtttggttaagaaaaatagaagtcttaacacagccctgcaggaattaatgaaagagccagacccttgggcaaaggggcagagttggaaaaaggctaaaagaagaattcttagagctgaggggccaatgagcacatgtagacacctagaaaaatcaactttagtgtttcattctgcagtggtggattatttaacctctttaagtctcattttcattgacaataaaacggaagtaaatggtagtaccaacttcccagaatcttggtttcataaagcccttaacagtgtgctaagcactcaggaaatgttatctcttgttattattacttgtcacactgactaatatcagaaaatcatgaaggagttgtgaattcaagatatctttcctctctcctcgtctttgcctcagttgaaaagcctcaacctagtttaaggatctagcctctaagactgatgaatcatgctgtagcaaaagtgaatagacgtgattggcattcactggtgctagccagagaattaggttccccatgataaaaatggaatggattgggctggcctcatctgattagagaaatctgcccttattgctgctatgtgattatgaggctggacttcttggacagcctggtggaggtcttgggagatgtgggtaggagtaagagctaaaattcgttgaagtacttggtgtgtgctgggcacaatactccttgtggggttcagtgaggcctcagatgcaacatgaaaggggattccaaaaactcagtcatcaagaaaaatatgattttgatgcaatattaaaaaatagaaattaatacaaaaagtctatggtgagcaaagtagcaaaatttaaagtaacaacaaaatcactgaaagtgccatgttgagcagtgttggagtctgagacaaaaggaaaaatcagttacattattcctgtctttatttataattttgatattttgttcagtaacattttttgcactgtgatttaaaaaaaatgtgcactcacatactgcctttgttactgagtttttcacatctgcttaaattttatgcctaaggagagtgcctcccttgccttctcctactcccactgcttccctatataagaatttattggccaggtgtgttggctcacacctgtaatccctgcagtttgggaggccgaggtgggtggatcacaaggtcaggcattcgagaccagcctggccaacatagtgaaaccccgtctctactaaaaatacaaaaaattagccagtcatggtggcgggcacctgtaatcccagctatttaggaggctgaggcaggagaatctcttgaacccgggaggcggaggttgcagtgaaatattttaaaaatattttaagtttaggggtacatgtgcaggatgtgcaggtttgttacataggtaagcgtgtgccttggtgatttgctgcacagttcatcccgtcacctaggtattaagcccagcatccattagctattattcctgatgctctccctcccccatccccccaccctcaacaggccccagtgtgtgttgtcccccaccttgtgtccatgtgtcctcatcattctagagctgcattctttgtgttgcttggcttatgacccctcctttcagcttcaaagccagtggggaagtgtcttgcttcagttattacattgcctccttctgttgtaattctatctctctctgcctctcttttataaagacacttgtgattacatgtaggacctgccgaggtaacccaggataatctctcctatctcaagttatgtccccttaatcagatctggaaagtcccttttgtctataatgtgacattcgcaaggtctggtgattaagacatggatccctttgagggccattaatcagccttccatcagccatatagtaagtggcaatgttcacatcagactgaggctgactggcttctgcatccctttgttggagtttgctgacgtgcagtcaaaccaggaggcaggcaccgaggaggctgcatcaaggagcatcaatttcagtctcattagaaggcctgacaagctctgtaggcagcatcaaggcaaattagtggggagtcctcctcatctttgtcctgcatccagaaccctgctcagaagtcacaggcaacagaaagtctcatgcttaatgtttggaaccaaatttatttgactattctaggtaatgagaccttattttatgctctgagctggagaggcaggaagttgtagtaatgcagagaaaatggatggcaaccttctttcatccccaggtgtcagtttcttcctatcagtgtggacattcttcttttgatgtatcttaagttcttactgacttaagtctcattttcctggcttcttttgttgggaagatggaaagcaatcaccttccactatctgaatgatagcatttattatttcagagactagtgacattttagccaattttgtcttattgcacaggaagtaaaaaggagtcaatgtgtgggatagtcattgtgatttatttgctgttgggtttcaacatatataataagaattacctttattttctgccagcaactctttgtaagttatgcaaggacattcacagactataccatttagagcagggttgtgcaaacttctgtagagtgacaccgtaaatattttaggctttccgggctaaacaacctgcattgcaactactcaactctgctgtcatgtcacactgacagataggaacgatatgcaaagatgtcggtgtggctatgctccagtgaaactttatttatcgacactgaatctcatatagtttgcaagtgtcatgagatattcttttgatattttcaaccacttataaacgtttaaatgtgaaatgtataaaccattcttagcaaacactggtagtggactgtagtctgctgctctctgacctggtaatcttcaaattttgtaacctgttcctggatgatggcttgagggcaaagtgaggtaggctggcatgacattatcctgttgggagggccaggtgtatttaatgtcttgcccctgatcctgtctcatcttctatcttcaaatccatcaatgactctaaaataaactgctgagattcagttttaaaatagctcctcttccatctagtttgctgtcagcctccagatcctggttagactctttaacatccacctgctcccagactcctccctcttgctcctccctttattttcacccaactctattatttgtgtatatttctgccttctccattttccctgccagaatgtaaattccttgaagagtgagagcgaatacttattaatctttgctgctgtagtgcacttatatcagaatggtggccagagctccataagtgttttttacctataaattcttctccaaaattacatgatgaaattgggtgccatctaaaaaacatagagatagtatgtcctctgttgtttttccatatgtcatgcacttttgacccaaataatgataaaaagcaactgtgtgaatgtctgcatttgaagatactactcttgggaaatgggtcttctttctctcagcactgaatcttccatcatcctggctctaagctgtgctaatttgaaaataagggagaacaaagaagcttggtctggagatgaatcacagtatgaaagaacacacaatcaaatggcaaagaaaaggtggacatgcttaggctgattcataccctggtaaattaatggcacagttgcctcctgattacaaagatctacttccaaagaagctactcttgttgataaaagactcccagcccactgaaaaggaaaaggaaacggagtctcagaacacttcaaataacttttctactgtttggaaaatattttcctgagatgctgagttctatcatcagcaaagaaataatttattcagaagtgtggaaggatttagaatttctccagtgctccctttcattctgtttaagatgtgggccatatctttgaggaattcctgcctacaggttgtcacggggtggttaacaggatgtaagagcagttgctacagtatcgagggacctagacgtcatcaaagtttggtttggatggatatgacaacaggacgtgtgcacaaaacattgtattgatgttaggccaaagatatcaatgaacaatttaaaaattctgcttctgtgctaagggcagccaccctgccatgtgagcagcagtgcatgagggccaggaaattaaaaggcttaaccgcatgccccaaaccatccaagctactttattgttcaagtgaagtgaaatacaaacacaaatagccaggagggtgaaatttaaattaaacttcaaaatcattttgtgttttaaccatcgacagtgttctttgtgctgcaaataaggccacatttatcggaaacctagaaaaataactcccttggctctatagtctcccttttacatactctgcacctgttcactttgaaagaaagtttgaccaggttcccaggaatgcaaagtaactacctaggaggactttctaaaccatgatgaccatggctaatgctcttctccaagatgatgatctggatttcagcaggatttcaggccaagattgtcgtgcctttcattgttaggtggctgcatttggaaatgccttgcaagagagacatctgcaagggattcctaatgattcaccacgttctggctttgtgacttggatacgcatttctgtagactggtttttccttggcacagttgtgctactgctctccagtcaggagctggatgtgaatgagcaggatgtttccctgaacagttgagcttttattctttgaatcacagaccacctgcagaaattcccccttatggaaagaggttggaacccacgctggagctaggcaacaggctcagtggattggcaattccatgttttttttttttttttttttttttttctgagaccaagaatttttctgccttcggagagatttgggttcatttataaaagaagatttgatttctaaaagtctgctattaatgtggcaggctaaatgaaaaagtgttgaaagcaataagttaaaaatcaatttctcatgagaggaagccaggtgcagtggctcacgcctgtaatcccagcactttgggaggctgaggggagcagatcacctgaggtcaggagttcgagaccagcctggcccacatggtgaaaccccatctctactgaaaatacaaaaattggctgggcatggtggcatgtgcctgtagtcccagctacatgagaggctgaggcaggagaatcccttgaacccaggagacggaggttgcagtgagccaagatcgtggcactgcacttcagcctgggtgacagagtgagactctgtctcaattaaaaaaaaatttttttttcatgagagaaaataacaaggttgtaaatgtcactgcctgtgccatgtagaaagaggtatatttttcaaagacatctatcaggtttgctacatagatattgtttctttaagaggatttaagaagggtgttcatacaaacttgtagatatggggtttgaagtaggaggaaaaaaaaaacagaaaaaaagaagaaagggagtctagcgagtaggttttaagaacagatgcagttcctccaggcaaatctggtgaaagggaccagcatgacttctggccctcgtggggggctctggggtcccgtggtcacctccttcacagcaggcagcagcctctaagttgctcaaaaaagcttctccttaaggccaagagaagtctttatgtttgagcctagactttatatttttgccttgattaaagaattctctgtgtttatttctttttacttgaaggtgctttctctttaggttgaggcaaaaagaaaaataattcttattaataggaaagacacaaagaacttttcctgttactttgtgggtgagtactggccaccatctgtggtggtttaaaaaatctatccataaatgctttgatagttctgccatcatgaagtggagtctatgaaccaatccccggaacatgggcagcctttgtgatcggcttgatgaatagaatgaagcagagttatgctgcctgactgacttctaggccttggctagatgatgccacatggctgctatggtttctcctgtgactctagttctgggagtcttctgccaccatatttgtagtctggccattcttaggtaacgtggaaagaattaactccgcaggggtaattgttcaaactcttcacatttcgaagaaggtttggcccttgttcagcccctggagtgtttttatttacctgaaactttgggccatgccagatagttaataataatgtgaataatggtagcagactttgggctgtggtatcagcttgacctctggaggggctgaagagctgaggtcaagcatgggggtggtcagccatgccagtgtaatcctcagtgaaaacacttggtcaaaccttggccaccaaagtttgagtgagcttcccttgttggcaatactttgtgaatattgccatatatcattcctggaaaaattacgtgctatctcaatgactccactgggagaaggcaactggaaactttcccttggtgtctcctagactcttccctaaccacctttttccattgctgattttaatctgtatctttttgctgtcaaataccataactgtacatacaacagctctggtgaattctgtgagtcactgtagcagagtattgaacatgaaaatgggttttgggattacacacacacacacacacacacacacacacacaccacagagagagagagagagagagagagagaaataaagagatgagagagagaaaaatagagagagagagagatagagagtcctttctcatgagggatgcccagatgctcctatcccagctgtttgagtcttcccagtactggtgttaggcatgtgtgaagaaggtttcaagatgaggtcagccccagccactgtctgatttaaaccacgtgatagatcctgagtgagaattgcctagctgagtccagtcaattcccagatttgtaaacaaaatagatgattattattatttttggccattgttttggtgtaattattgttactcagcaatagataaccagaataggttttggtaccatgagtgggatgctataatagcatgtgtgaagaggctaacagcagaagtttgatggccctcaaagagactttcagtaatggattaaaggacattgacaaaagtgttgctggaagctggaggaaaggagacccttgttacatagtggtgaaaagtttggaaacacttttgcctaatgaatccaatgagctggaagatttggccaagtagattttcaggtggaatattaaaagcaccaacttgtttcttttggctgtgtataataaattgaggataaaaagaaatgggctacaattggacaattggaaaattctgtcccctgacacatgcacaataaggggaatgaagcagtatggagtctaagggtctgcatgtgcattaggaggacagggtggagctaccaattgcaaaaaattggaggataaatgaaagaggtggggcttacagatttgaaaataaaattggtttttgtcttctccagaaggcaaatgattctaaaattaagacacagcttcagaccaaagattatttccagggtgggactttaaatcccttctaacataatgcatcagagaatctctcagacatacaaaaggcttctaaggtcttaaggcagtgcctattagatcttctctaatcaaaaacagagcttacaaaaaatcttaagggtatttcccacaaagtcctacaggtaacctgaggtctaaaggggctcatcttgaggagatttatgtttgtggcttttgtctaatggtatgagtgataacacaatcgtaggctacccacagaacttaaagagcgtttcaatggtagaaacatcggcagcttggactaaaagtggcagaaacagtacaaaatatagaaagggcttgacactccccaattattgtgaacagaaagcagactaaggaatctcctcaattggaaatgccaatactttcttatgggaaaggatgggtgaaccagaagtgagaaccaagaacaaaaaaggcacaacaaagagcaatgagaatcatttcaaggcaataaactgaattctaaccagtaaattggcaatgtaagcccagctagatttcaaaattgctatggatcagtgtttgttgtgcatatcccattttccttcttttgaatgtgtctgttggaatatcctatgcatatatcaccattgtatgtggaatatgggatgaaggagttgagaatttgtctctttagttcacagatattcatactgagagaaaccgtactcaatgtgccgcttctgaggaaatacaccccaggagactcacttacccctggacatgactaaaatgatgggatcttgaaccttgagcttgagctgaatgccataataggtgagacttctgagaatatcttagaggtcttaaaaggacatgagtgtatttttcacatgggaagaatataaatcaacttatttattttagctgtatatggtaagataaagatagtgataaattagttataagtgatgtttattttcaatcaaaattcagaagacaaataaaagattcaggcttattgaatttaaaaataaacctgcttcttatcctttccagatggcaaagaattctaacattaaatccaacctcagggcccctgcttggtgctcacacatttcaaattggaagtgtagggaagttattgtttcgtagaagagaactttagccattgaggggaggaaaccaatagataaattcttctctttttcttggctaacaaaaaaataatcccgagatgtggatgcagtgtttattacagctttcagccacaatcccaacaaggtgtgcaatcagtcacatttagtgacgtccaggtcagtcacacatctcctactcctttcttacttgctttcttctccttctccctcactcttcactcccattccttaagcttggatacctttatagcacatacaccctctacttcaagctttatttcctggtggtcaaggctaagaaagaggccatttgtagagatttgggatatctagcagtgaagggagaatatatatctccccacaagtccaccacacacatgctttgaactataaaaacttgtggacctgctccatggtatttccagacagatattggctagttagttgttgggaaagaattgcttgtatctgccagagttttggagacatagacattgacctctaaatcattctggagaagtctaaaggtcagaggcttgttggggctacacagatatgtatagtggagaaaagatgccacattttcccactgtttaagtgggtcttgttgtaggtcaggttctttgggaagcgcactataaaatgaagagtagtgggcagtttattaggaagcattcttgggatcaactcttgtagaagggaagagaagaagggagaattggccagagagacaaagtagctgtgatacagtccaagtgaagtcctcaactgatgccatcaggagctctgaagctgaaatggcccttcagagttgtcccaagttggggcaaaggagctggtcttttgtactcactttggctggtcattggaggcaggccgcccatggtgacctaaggcaaggaatctgtcctcactcaaggtggttattgatgaattcctgagaggtgagtgccagcagtagtcccaccatctggggaaataaatcattcagtcttgaaaggagggtgtgggtgacacattgcagcatccactacagatgcattggatggtagctgggccaggagaagcttcttccaagtagaggcaaccccaggtgacaaaccttcctggatgtgccttgaagtagggcctataaaggagtcaaaagcagtcagccagagaaggtatctcccaaatcagagcacagcagagtacaggagcttcctacagagggaactctgaagaattcattaaaatttcctgctagaaaaagtcagcctttgggcatctgctcacaagtgagcacccacacctgataaaagcagcacctgtcaagatagacctttgttcccttagctgtctgctgctgcctctcccttctgcatcttatttgaggtctccagaaataacatagtgatggggaaggagaggaagagcaaagtagagtcaagggaaaggactgttgcagtgcagaatttgcaacccaagctggggaaggggaaaagttctaattggataagagacaaatgtcactttagattggactggatgcaaaaacgaattgttcaaatacccagaaatcccctgaacaactctgagacctgccctaagttatcatgcaatgatggaaaatggggagtgattagcacttttccatttagtggtaagaaagaatagagttagtttctgcttctaccctgttgaatatagtacagtcaaaaggaggttctacttatgttactgagctaaatcttcgcaaaactctatggaatagttgtaattactctcatcttagagatgaacaaacagatttggggagcctctgaaatgggccttgctctttgtgtgtgttccttcaaaaaaagtgatcccagccctaagagttggattttagagaaggaaagtaaaccttggagggttcaagtgacttgctcatgtcctgtaactagtaaatgggagagtgagaattccaactccgaagactttgcttttccctctatagttggtttcttctgacctacaggatgtgatggttggacatcacctctgaaattatttgttctgaacatttccctgggaactgacttaagtccaataatacattttgcagatgagggaagtaaagcttgaaaagattaggtgccagtttcaatgccatagtagttgctatctcctcataggaccatatttaagcctgtccagcaagttctgtaaaacactattttgagggagcatttatgaggtttgtaatttcatttgatgctgtgttcaagtaatttggccaataataaagtcaagtatgttttaaaatttcaggtttttggtgaagtttttttgtttgtttgtttggagacagggtcttactctgttgcctattctggccattctggagtgcagtggcgtgatcatggctcactacagccttgacctctgggcctcaatccatacccccaagtagctgggactacagatgtgtgtcactatgcctggctaatttttatatatttttttgtagagatggggtttcaccatgttgcccaggctggtctcaaactcctggaccctagtaatttacctgccttagcctcccaaagtgccgggattacaggaatacgccaccacacccagcctcagggaagttttgagaccaatatttctcctgattttgtggctttgtgttatcagtgagtgtaatggtgatatgctttaactttatatctggccctgatggtcagtgatgctagtcatttattcatctatccattcagttctcatgcatttatttcctcatttgagtttgctgcaaggtacactgcaaaaggttttttaaagggtatgaaagactgcacatgtcccattctggacactgagccatgcttttcctctgtgttcctctgtctgctgctgatgtgtgaaaggggttatcccacaagaggacaattgtgatgtttctgacagttcttgaaggacacatgtggctctacaagggacaattcgtattttatttaagagatttagaaggactttggctagtaactactttcattcctcagagatgggaggtttattgctggagggaaaaattgcacagacagggagacattttggaggttgaggattttcctcaactcctcttttccctttctacataatataaagcctcccatataaattagaaatctaatcagaattgtatgctccactcaacagggatgagcttaattgggaaattcgcttaatcaggacatctcccagggaactgatttcagcccgatgatacataatagctatgattgcagttttaaaggtggtggtaattctccttaattgagacacttttaggtaatttagtgctgcttgggactaggtgtgtgagaatgtgtatgctctggcgtctctgatttgttttgttttcttctgcagtatggagtgcaggattaattcacacaactgcatacattagttcagcggtgccccggtacctattttcattcacaagacaaaagtcttaggctccttggcaaagaactgccatgcttcttgtcagcagtttggaattgatacgtcagcccatttcaaggtgtgattgtgggctggttagcattttctttgtaatagtttaaggggaatttcttcaggcagcagaagtgatctccttctggctctttgattcttgctccaccttagctcctgagtggccttcctactgggaccttatacaaattcctttacgttgacctaaattctgtggggttgagcagcatttgagaagaatcaattgcggggcaatggtaaatgcatcaaattctttttttgagacctacgcctgaattagagatgaaaagttagagtgatggttgttgttatcaacgtcgtttgtgcatttctttagcccctttcgttcttttaggaactgggtatgcaattgatcatagtcctcacttcatattacactatcactattgggctacgcatgccactttctaaatctattcagtcattcaatcacacactttttgatttccttttatcccaaacctgccatcattcttctcttctttctccctctgtaggccaacgttataccatgtttaatgtgtaaccttttcttgtgtgccttcctgaaaaatgtgtatggttttacgtgaaggtaaattaacaaacaagatagttatttttttcatataacataatttcaaatgtggcctgatgattccatcatgtcattaggaactcctcgtcaggatgtacgctgctgtctctagtcttggtttccattctcaaagtccaagagagcagcccaaaccctagtcttcacatttgctttccaaattgcatgaaggagaaacaggaaagaacagggtggtatgcatgtattttaaaattaagatacatagtattgttcctcacttttttccactaagcactacatatttaagatctaaccgtgattttatatatatataaaataaaatatatatatatatatatatatatatatatatatatatatatatatatatatatacacaagttattacctttaatttcttcacaatacttcatggtgtttatccaccatattgtatctcttatattagttaaggtatgacttaatacacaattgctaaacctttcgaatttcaggggcttatcaaaccatctaatcagttaataaagttgaaacaaaattaatagttcagaacatagaggtcccctccaccctataatttagggacccaggctctttccatcttgtggtactgcagtttcatcacgtgcatcccaaggctgctccagggcttatctccattcaagccattgggcaggaggaaagagcagggacatttgcactggagagggttctttttggcaaagcctgtaaattagtctactgcattccagccaaacattcttttgtttttttggaatgtagtcatggatttatagctaatctcaaggcgatgctaagaaatatgctttttgtgcatattctggaggaagaggaaaaaagcttggtgaggagccagcagtttcttccatatgtatgtcctgtgtcagaaattcatagccagattgcctctagttccctccatcaaaaataatgctgcagggaacatcccgttttgtacactctgtggatctgtgtgaccatgtctttagtttctacacccaggagtggaattgctgcaccgtaggacatgcacagactaatttagactaagcggtgctagttgtactctggattggcaataccatctgtacttaccaccaatgtatgaggatgcctctatcctcacatctttgtctacacttcatgcttcagctttctttttttggaagactaaggtgtgtaaagaaatatatcattgctgttgtaatttacattttttccagtggctattgattttgaacatcttttcatatgctcttataaacccttggattttcacttctataaattgtctagcaatattctttgctcactttttcattgtggttcttgtcctttccttgagttgaagaatattgctgaaattgaattgatgtatttatgctcattctaaatgcttattaaaaacttcttccggccctatgggtcacacctttgacactgagagtctacttcatcttttttttaaattttttttttaggcagagtctcgctgtgttgcccagactggagtgctgtggcatgatcttgggtcactgcaacctctgcctcccaggttcaagcaattctcctgcctcagcctccacagtagctgggactacaggcacccaccaccacacccagctaatttttttttttttttttgtatttttagtagagacgaggtttcactatgttggccaggctggtcttgaactcctgacctcgtgatccgccctcctcggcctcccaaagtgttgggattacaggtgtgagccaccatgcccagccctgtttgtttgtttacaggatctcattgtattgcccagactggcctcaaactcttgggctcaggcgggagtctgttctcggagtgttgttgagtagggagtcaattttattttctccacataaaaaatcatttttgaccacatcatctatttttgtttttaaatatttttaaaaaattaacatataaagcagtatttatcatatacaaaatctatgttttgaaacatatatacattgtggaatgcctaagtttagataattaagatatgcgttacctcagaaagttatcatttttgtggttagaacatttatgactgcatcatctattgaaccatctgccctgtattcactaatttatggttctagccttttcatatattaacttcccacatatttgtgcatctgtctctgagctctattttgccctatgtttaatttgtcttttttttttttttttttgccaatactattctgatttacctttctgtgcctctgagatatgtcaatatcaggtacattaggtttcctctttcctcttcttttgaaagattggtgctatggtttgaatatggttgttcccaccaaaattcacattgaggcttaatcctcaatgcagcagtgttgggaagccaggcccagtgtgaggtatttgagtaatgggggtggaaccctcatgaatagactactgtcatctctcaggagtgaatgagttcttgttcttgcaggaatggattagttccccaagaacggattgttataaagcaaggctgctccttgtgtttggtgtctttgcacatgcctgctcacctttccacttgactcattcagtacaaggccttcaccagaagctgatactagatgccagtgccatgctcttgggacttccagccaccagaatcatgagccaaataaccctttttttttttttttttttttttttttttaaataaattacccagtctcgggtattctgttacagcaacactaaaaggactaagacagctggtttagctacatgtgggcttttattcttttatgtaggtattggagtatgttgatccagtttgttaaagaaataccactataattttgactcggttgctgttcgatttgtagattaatttggagaccaatacatcgttataatatagtcgtttcaccccggagcttggactttgtctttacctagtcaactcaccttgtcctttattagcattttaaaatgggattgattatgttcttgtgagtttttggttaacttagttttaagacagtttatagtttttattgttattattaataagatcctgtttatattacatattccaagtagttattgttggtgtagagcaatgctattgatttttgtagttgggttggctgcatatctggcaaccatgataaactctcattagtttcaatagtctattgagactgttgatttgtctgggtagatgatcacaacacatagaaataataacattttatctccataatccttataaatgctctcttttttataataattccttctctctagtgctagactaaatagtagctctattaatgaatatccttgttttgttctccttcctatagaaaatacaattaaaattcttatatgcataatgtttggtgtctttagattttagtatttaatctttattatgttaaggggagtttcttttgattttcctcacatcagagactttcaaaatattagaatagaaataggactttattcagtacttttattttccttgagataacaatacatctttttttcttaagtctgcaaatgtgctattatactggcccactttgcacttgaaaactccttgcattcctgagatacacccagtttgttcatgatatattacgaccctcaaagataatgcaagtgttcttgccactgaatgcagaaccactgaaaattaggcctacaaaaagagggccataattaatttcaatcttctgttttatcctccatctctctccatataaagtttctaggcacttacataaactgcttttgcaagtttttgaaacattaagactcagtttttaataaaaattattttttcatttttaaataatgaacattttgaaaaattcagagaagtaagaagagggaaaaaagtcacttaaattactgacatgaaaagacaggcttaccaacattttagttcgggtagctgcaacaataagatgcttttccagaaaaactgtattcagataccaggtgggctgaatagaaaaaaaagccagagaccaatactagccacaccaatggaccctctattgtcagcgttttcagggagggactatttgttgaagtcccacaaaagccatgggtattactcttgtgtctattgtacaatataaacaatgagtagttcttccagttatggtgccaactggctgaagagagtttgggctcagcttcaagtcatatatctcttaattactttagtagggaataaaagagacatggatcagctgtaagacctggtgtgagcttggactctggaatagcattgaagcccagcccagaatattttgaaatatctgctaaagaggcagaacattatgacatcctttctgctttttggccaagtgattcaacaagttctattaaaacatgttgggcatttttattcattggtgttctctcaagaatgggcaataatcctctgggtctgaatgtggcttacatcttcttatgaataattttgcatgtggtcttagtttttatgtgatatcacagagcttgtggtagtgattctttataatccctgcaattcattttgtgtattttcttgccttgctttttgtatattggaagaaacctgacctctcagaatgttccactcactgacgttctctggccctgtggcttctagttgggtttgtccagtgggaagtctaattgcataatgttccataccactcccccttcccatcttaaagtggtgtcaacagaggctgtgttcttctactgatagccacaacttctatttggtgggtattttatggaaacatcattcattctagctgccccttctggcttatggatgttaaataccataagatgatgtgattcgaccacatcatctatttttatttttaaatattttttaattaacatacaaagtgtatttatcatatatgaaatctatgttttgaaacatatacattgtggaatggctaagtttagctaattaacaaatgcattacctcagaaagttatcatttttgttgttaatgccatgttgttaatgttatcattttgatgttagtgccagcccttactggtttgcctaaatcttgcctttacttctgtcaatagttattttaataaaccctctttattaattccttagtgtgtcatgtatttcatggcaggaccctggatggagacttgttgataggaccagatacactccacatattggtatattttggggctttcaggatactataagcttaggacaaaaccttcctgctctttggaagtaggtcacagcttatttggctttgatgtcctccaaaaaggtgtgttgcaatttaaagatgacattgaacatgaggcatccctatgagagcttggagaaacatcattttatatgattctttagtgtgcaggtcctttgaccactgaatattgtattttaattgtgagcaacataagggaacctcatgggtgcccattgtttcgctatgattttattttgaaacaagctagagagtccctggaggtgttgctttctctttgtattgacttctgacttaatagtaataatagtaataataaaaaagtaatattttgtcaggcatgacatatgtacccttgatagtctcactgatgatatgagaaaactgaggtccagagagaagtaaagaaacttattcaagctcacatgtgtagtaagctgctgagcagagactcatcccagttctatttaatttcaaattctgaaccttgaacttagtttcttctccttccccttctagaattccccctgttgattttattttactcctcttctctctcccagaagcaaactataacatcagagactccacatgtattaaagtagatatcagaagacatattgaatttcactttgatgacattgtagctttgaatagtatttattacttatggatccacataaatcctattataaaagaagaattttagttctttgtttgcacctccatatcaattttccaatttgttctaggtggttgacatttagagtcagaatcactggacttccttgaccagtgagccaaatatgggttctggttggattaagccaatatggggcatgaccagaggtcagagacttggaaaagagtgatgtgttagttcattttcacactgctataaagaactacctgatactgggtaatttataaacaaaagaggtttaattgactcacagtacagcagcctgtacaggaagcatggctggagtgccctcaggaaacatacaatcatggcagaagggcaaaggggaagcaagtacctttttcacatggcaaagcaggagagagggagtgaagggggaaattgtacatacttttaaacaaccagatctcatgggaagtcactatcatgagaagcaagggggaaatccacccccatgatccaatcacctcccaccaggcccctccctcaacactggggattacaaatcaacatgagatttgggtggggacacagagccaaatcatatcattttacccctggtccctcccaatctcatgtctttctcacatttcaaagccaattatgcctttccaacagtctcccaaagtcttaactcattccagcattaactccaaagtacaagtccaaaatgtcatctgagacaagggaagttccttctgcctatgaggatgtaaaataaaaaacaatttagttaatttcaacataaaatgggggtacatgtactgggtaaatgctccctttccaaaagggagaaattagctaaaacaaagaggctacaggccccatgcaattcccaaagccagcagggcagtcattaaatcttaaagctctaaaataatctcctttgactccacgtctgacacccaggacacactggtgaaagggttgggctcccaaggccttaggcagctccgcccctgtggttctgcagggtacagcccctatgcctgcttttacaggctggtgttgagtacccgtggcttttccaggcacacagtgaaagctgttgatgaatctaccattctggggtctggaggacagtggcccccttgtcacagctccactaggcagtgccccagtggagactctgtgtgaaggatccaaacccatattttccctctacactaccctagtagaagttctccatgagggctacaccactgtgcagacttctgcctggacatccaagcatttccatacattctctgaaatctagtcggaggctctcaaacttcagctcttgccttttgtgcacctgcaggcccaacaccatgtggaagttgccaagacttggggcttgcaccctctgaagtacacagcctgaggtgtactttggccccttttagccatggctggaactggagtagctaggatgaaggacaccatgtcctgaggctgcatagagcaggggtgtcctgggcctggcccacagaattatttttcccttataggcctccaggcctgtgataggaggggctactgcaaaggtctctgaaatgtcctggaagcatttcccccattttcttggctattaacattcagctccttttcacttatgcaaatttctgcagccagcttgagttctttcctacaaaatgagtttttattgtctgccacacggctgggctgctaattttccaaaattttatgctctgcttcccttttaaatataaattttctttgtttatgcagatgagcataggcttctagagacagccaggccacatcttaaacactgctgcttagaaatttcttctgccggataccctaaatcatctctgtcaagctcaaagtttaacagatccccagagcaggggcacaatgccaagtctctttgctaaagcatagcaagagtgacttttactccagctcccaataagttcctcatcttcctctgagacctcctcagcctgtacttcattgtccatatcactatcagcattttgttcaaaaccatccaacaaatctctaggaaagttccaaactttccctcatcttcctgtcttcttctgacccctgcaaactgttgcattctctgcccattacccattacccattctctgcccattacccattacccagttcccaagttgcttccatatattcagatatcttttagcaatgccctacttctctggtaccaattttctatattagctcgttctcacactgctgcaagtaaccacacaagactttgtaacccatgaagaaaagaggtctaattgactcacagttccagaatttgtatagaacacatggttggggaagcctcaggaaacttgcaatcatggtggaagggtgaaggggaagcaagcaccttcttcacatggtagggtgggagagagagagtaaaggggtaagtgctacacactatttttttgagatggagtcttgctctgttgcccaggctggagtggagtggcagaatcttggctcactgcagcctctgcctcccaggttcaagcaattcttgtgtctcagccccctaagtagctgagactacaggtgcacgccaccacatctggctaatttttgcatttttagtagaggcagggttttgccatgttggccaggctggtctcaaactcctgaccttaggtgatccacccaccttggcttcccaaaatgctggggttacaggtgtgagccactgcacccacccttacacacttttaaacaaccatgtcttgtgagaattcactcactatcatgagaacagcaagagagaaatctgtccccatgatccagttacctcccccaggttcctccccctacactggggattataattcaacatgagatttgggtgaggacacagagccaaaccatatcaagtaaaattcatggttccatgagcttcatctcatcaggacctcatgtttccaatgaatgaatttctctacttcaggccatagctcctgttgggtggcccttttttttaagggagcctgaagattctagtatttgtcccttcctcttgctcctttgtgcttagggctagtgacagatccccattgttgctacccttggacctaccctccactcagggaataggtcttcataacactgcctccattgccccattgactgtgacagtgggttcttgccatgatgttcaggtgagaaaatcgtatgatttgcctaaagttaaaaaaatgagttaatgaaagaataaaacccagattccagaattacttttgactcttgaaagaaagattgaagtggtctagccaaccttaaagaatctcatggggagaaataaagtcaaaaatctcacctgaagaccaacaaacattctgcagtgctccagccagcttctgaagtatctatctcctgtccagttcctttaaaagtctcagagaaccaccaaagtaagctgagctgatgaccttggaactcttttagacagtcagctatagagttgacaccaaatcttacccatggaaaaacagagctttaatactattttgatcataaatagatttcccctgttctcactaaaactcttcagtgttctagttatactctcagtaaaagaaagaatctatttatccttggcttagcgaaattaccaccttttcatgattcatagctgcataaataatttttaaccataaaagcaatgtgatttggattgaagatttttagagcgcagctcaggaatggaaaacctgttgtcacagggccacaatctcattctcaatacatgtgaggtggaaaatgccactgtcgcttctcttgatcctgtgattaagggtaataatgtgtcatttggaagatctgaagtgaagaataatgcacttgtaaaaatggtagtttgaaagaagatattcatgacgagccccagctctttcctctgattaagctgttcattctgtgcacatagcaaaactgtccccatgtgtccccatgctgaagaatcatgggtatggggtcatctcagctagtttgctgcaggagcatctgatgggggagtaaaatgctcatctttcctgcttgaacacctcatattctcttagacaaatttgcttggagctccctgaatgtgattagtgatggtggttgggagtacatccttccctcctccatagggaaaagccaccactctccgataggtggataatgtggaaggactctcatgcttggcccttggtaaatctctgcttttgtgggctggggagtaggaaagggcagcaggagcatggttgcagtgatgtagacctgaaagatgaacctggctgtgtgttttgtgcattgtttagaaagtgggatactcgaagctaccttgcaataaaactggctaggtgcttggtagttcttacagctcatctttttatcttaaagaggcacaatattttaaccatcttagacaaataagaacccctgtaatcctttcaaggaggcagcattagtaacctttgataactgatgttaacattttatcactactgtcaggaggatccaacacagtcccaatctatttccttcaggttacagcataagcccctcctttttccttctcagtggcaacagatccacccatgtctacatgccagtctatcactcttataaatgtggagctagctgctccttaactcatcctaggaacccactcttcttcccttctctccattcctccttcctttcttcctttcttcttcttcttcttttttagtttattagtcctgaatttttgagtaaatgcattttgtgagtgcataggtactgtgctaacatgttatatgattttaaggtatgagtgagacttctatcttttatttcacgaatgacttctgagatatccaaggcaaatacagacacttccaccttaacagaatctcctcagacatggatccttgcttggaagatctgatttgtttgtgagtgtctgggaacttgcaaagtttgttacgtattttgggagaaaaatcagatttgaaaaatataaagagggagatagtgagggaaaatataaatccaagttctcttcaggaaaatttcagaatgggagaggagagggttgaaggtttatatttgggaggtaatttaatggccttggttggacacacttgtgcaggtataacatcttgcatcgtgtgaaccagtcactgggagtggtggtggaaaggctgatttagatgtgaaacaagaggcttataccagttgccaacataaaccaaataactttaatatcaaaccatctaaagtcagataaagatcactgaagagacatgggaaaaaatcagggaaagtttcatacagtcagtggcatttgatgttgggtctttaagtcaagtttggatctggagagatggaggtgggaagggaggggaggaaagatgaaacttccacaaaaatgggaaaacatgagccaggtacacatggagataatggattgttctggttcgataaaattaacctgttgcatggcctctaattctcagaaggaagttagaaggaaatcatccaggaaatctgtatgatgagatcattaaacatttcagtgaaaaatacccttgcaattaatttcatttgcaacatgcatgcttatgaatcactatatttgttgggatgttatgaaaaggtcaaaatgaattatatatttgttatgattagctcaacattctagctgtcatttgttattttggttcccttgagacaatgaagactcagttcttatccctacattggagttttgagtgtcatttttttagaactttaatgaaaatgtttcttttatcactgtaatttggtttattatgcttaatgccaccaaattacttttaaatcttggcatggctttattaaaaatgatctcattttaatttgctgctctagatacagaattcatcatgaagacaacacaaacagctgcctcttcagagatgttctgaaagtagcttaatgagaaatccacaagtactgaagacattatgaatgcattccaaattctctctaatgttggttacctgaaaatctttatgttttgtgtgtgtgtgctttcttttccagaaattgctagactttcctggtctctgactggagaatttaccagtatgtatttcctgtgggcagatggagatgcaaatctgaggaaaactcaatgacatccacaatcatggtctataaaaatcaagtgtctcaacaaagcatcagatttgaaacgttacctatttaattctaatattatcaaaggcagggactatattttgttcaaaatctgtggcaggtgtctgtgtggcacttgcttaaggggttgtccattctttattcagtaagtctgcatttattgtgtactgtatgcaagaggatgaacaatttatatagagtgattggaatttaaaaggaatatttggattaacccttctagaagtttataatcagctggaagtttacaatataatagtctcctatgagaccgttggaaacagtaaagtttgagacactcactggaattatcacatcatgacatccatatgacttgaatggctcactttaggaatgagaagtaataaatcaatagcacaactattccgaagactaagtggtgggcactttattttattaaatattaaggttagaaatgacattttcctacttaagcaccttggcaatgcactggtatgcttaaatattgtatcgaggaaacactgatggctatctctccatctattttactaagtgatggtggtaggcaactaattaccctatggatagttcttttaaaattgagtcaaaatttgcattaaaacaaaaaaaatattgtaacatgccttagttaagaacccgtgctctggactctgacagattgaagtcagaatcttgttctttaaccaacaggcagtctgtccttgggttagctactaatgtcttctcttgcagtttctttttgtgtaatgcagatgataatgcagagtgccagcctcatacactgaggctgagaggacactcgagatcatgtatgcccagggtctccataggtttggtcaatgctacttggtctctaagggttagtagggagtggggtctggttttgatgctgtggcggggcagggggtagtgttgtaccattcgccactttatagttaagtgatcttggacaagctatctaacctctcggaacctcagtttttaaaaatataatatttaccttagggtttctatgagcattacatgagcaaatgtgaaggacacgcaaagcacttggatttagtacatccttgttaaatgatagctgaaattacagttgttaatgttacctgatgatgtgagcttgataatttactgagagtgtatcccaaatgagactaaggcaatgtattttctctttttgtatatagaagatacatatacatttttatatatgtatatatttctcataaagtccagatgaaatgtcaaggttggtctgactcctcggggtcatcctgattactgtgatgcagggtggaggtcccttgccttctgttggctcctttggattggacccctattttttcatcagtgaaggtttcaactttattagtagaactctgtggctgccaagaagagaaagctagggactaatgagtaaaatgtcttatgatttattgtccaaatcaggacacttttgtgagagaaaatagtgtttaacctatagaccttgatttcaggcttaatgcctaatgttctgggcaaactagaatgtctggttactctcccaaaaaagaaaaatggatgggaaatggggagggaaaagaaggaagaaggatacaactgtaaacaaacaaacaaacacatcagacaatacctgcacacaaatccattttgaagtctccatttaccaagcagtctctctaaaatggaagaagcttctctaattggatattttgtgggtaaatcttaaacacaagtctctccagtgcacctgtgacatgactaagagtgcactcacctacaaagccagcctgcttgtttctggatttctagatgttcacatgtcaggatggtttaatgctggtcatttcactcccaaggcttatgggactttgagttattacttgtaaacacaggaggtctgtctccactctggtggatttactgttcctatttccctctgtttctttcttccacactgtcattattttaaaaatacagtctaaccagaaaaagttccccttcctatacagaactagacctgaacaaaactgagaacttagtgtacctttgaggtcccagcctctcccttcattacttcttccacacatccataggagctttctccggacattccattaccttgcttgctctagccctgcatacatttgtcactttttcctttggacatccttgaccagttaatgcttgttctcttctcattcttctaggctggaggcatcaactaagcagattgtcacttgggcttccttcagtcaatgctccaatttttactcaaccatggcctctctgatgttggggaacatctggtgggccatacattttagaaaaggtagattttatgtttctttaaaaatcccactacaaggatagctcccagagctacctttccctgagctgatgctgttaccctttacattattccttctttgaaacaacaatttcagcagattcttgactaagaacccatgtagtccttttgttgaaggcaaagggttaaattaaagccatagctgctgagatagagggggaaaaagctagttagttctattttatcttcatctagttttctttaagctactttctccttatttctgtcttcctgcagcttcttttaggctaagaataaaaaactttgagccctgcactatatctccaactctgtggggtcttgccttttctcctacaataaagatgaagcccagattcgaaatctgaaaggagaataaatcttaactgtgaacatcatctttcaaaacagctgacctccatttgtttccctgaatatctcacctgggcaatctttttcttttagcactaagaaattgctgaaggaagaaatgttaaatctagtttttaattaacttcgccattgatttctacataactctgtatgagtcactgttctttagtgaaagggatgaaaatctccaaggttaatggttgttaccaggaatttttctggactgggttccagatactctacactttcttctctcctctgaactcattagcttactctcttcttcaccctaaaacacaaagatgcacacagaaacgtaggtacatttgtatgtgtcaaatgtactttcagaatgaaaatatcagggagaaaggaaggtgattatgcattacatttaatagttgacattaaaaaagtcctgttctacagtttttcaatatatttttaatgaagttatttatagcaagtgttatatgtattgaatgaaaatttagttatgtataagtgaagacgaaagaggctggtggatcttaaaatatccataaaccagattgatatactatatattttagatattagaggttgatgtacttcttttctcacaaatttctgtaatagtatgtgaaaagatagagtaatattttctaaaataagagaaaaatttaaaaatgggagaaaaatattagaaaatgtaaaatagaatgccttggatataatttttagtgaagtgaataaactttgtatttcctccttctgatatgttatcattctagaccatctttagctggtcagattcatcatactccaatttataaatgtttaatttaagtcttctaatgcattttaatgaacgattttcttctatttgttgtcaataaaaattctgattgatatgaaatctgaatattgattacaatcaagcaaaacctttgtccaatatctgttattgttattgccatttttaagatcattatttttccctttcatgtctgaaaatatttttgtactttgaaggactagattaagtttcctagagatgtagaataatcctgaagaaaccaaccagttgtatgaaatactgactaatacctatttctttccattatttcccaacacaatgaatgccacctcaattttccagttaagctctcctcccacctccctgaatcctggaattttcctttgagaccactttctgaatccatggctgttcggattgtgcttcaaaattacctccttcatctggtggtctctctgcttttggtctggtgcagttactgaaagaatattttgggtgacctccctctagtctcccttctggtcttctttccttcaattcttcctctaccctcagccagagtgactgctacctatcaggcctattggacttacttgcattttatattttagctacaccaaactcatttttcctctaacataatagccctattctctcttatttccatgccttctaatatgccgcgtcctcagcctggctcctttcacctgataatatctgagtgaacctgcaaatcttcagttagctattcccttctccaggaagcccttcttgacccagccccaggttaaatacttctgagggctccttcagttttggacttcctctgaggaagttctaatcctgctttgagtaatatactgtttttcatctttgttttataattaattatgtgagaacagggactgatatggtttggctgtgtccccacctaaatctcatcttgaattttagctcccataattcccacgtgttgtaggaggaatttggcgggagataattgaatcatggcggcggtttcctccatactattcttgtggtagtgaataattctcatgagatctgatggttttataaggggtttcctgttttgcttggctctcattctctcttgcctgccaccatgtaagatgtgcctttcaccttctgccatgattgtgaagcctccccagccatatggaacagtgagtccattaaacctctttttctttataaattacccagtcttgggtatgtctgtcagcagcatgaaaatgaactaatacagggaccatatctgttttcttcagtatgggacccccagaacctagaatggtgcctagaatgtggcgaacacctttactttttgaatgtatttttgctttctggtatccttttccagcgcacttcactaatgttctgagtatcatttaaactatttataaaattagactttagaacacaaagataaattggttcacatagtaactaggtaacttggtataaactaaaagtaatttttaaaactcagcccaaaatgactatgtttgtctaaaccaataagaagaattttcaaaatagcaaactgcacaactgacgacatacagcaaacacacctttgccaatgggagcaagtaatggggaacaaaccaagctcaacttgttctggaaaaaaaccctgttgttttattattatttagaaagcacacacaacaatttattggggaaaaagaaaaaatgcaaaataattgagcatacaaatttattttaaaagaactggtgtcacttcccaagtcatatctatgtgagctttttaaacttttgtatttcttatatctgtattcataatcagagttatggatatagatatatggaaacacatcacacactcctcagaaatcctttctccaaaaatctgtagggaatgcatcctttttcttcctacaggcgtttccttggatcacgccacagtctcttttctctgagttcgtctctgatgacaagtaaggatacttgtgaaggaagatttccccttagttcttgactttttctttatttttttctgattcttcagtgagattcccagttcttccatgatagcgttgaaagagagacactagggaacatgagatacagaccatcagcttaattaagcctatcgcatgtgccgttgacctgcctcttgcctaggtatttatgaacacaagatattggcttgaaggcagctctgtcacaattggccagttcccatcacctcctcctccacccgctggccacccaccttttctaatcggggaaactgagatggcaagttagctgggcaaactttgggatttcattcacaaatgcagtagtataaaactacccagttaaagcaaactcagggctctcaaaatagataacttacctttgctgagacaccaaaatagagttaaattaagtcatttcccccactgagatgatccaaacattgataggattatcaaggcatacggacacttcagtaatgctatagaaaatgaacaaaccttctctacaccaaggctttgtttttttctcccatgaaaccttactttgttcctaaaataaaatctaattcttgatgactttcctttctgataaaaaaaaaagaaaaaaaaacaattttaaattgtacattttctccaaaaaacagagattctggcagcagcaatgatgcagctgtggtcgaaatgaaaaataatgtggtactgaacttcacagcaaaaacgatggcataatacaaaagaaaatggaaaacggaattatgattaaaaaatgttctacatatacagacaatatatataatctgcattgcaattatgctatatctgttcacatgcatagtacataaatggaccaataaaacataatttgctgtcatttttctagccaagataagacctttgagtgaaaaattcctgctcagagaaatttctataatgtcctggttagagaaatttctaaaaagtagttttctttttgatgaggtcactcttaaaacatcctctagtgatatgagccagcacaggaggacaaaggcagcatgattccacttatatgaaacatctaaaatagtcaaagtcatgaaaacagagaggagaatggtagttgccaaaggctgggaggaagggaaatgggggcagttgctgctcaaggggatataaggtttcaattatgcaagataaataagttctggagatcttctgtacaacattgtgcctatagttaatatcgtcttgaacacttagacatttttaagcggttagatctcaagtgtttttatcacaataaaaaaaaaatcctctaaaaaccatagcctttggtaaaggttatagaagtgcaagcatacttttttaaccttagcacacaaaatggatatggttgaaagtcaaatgacagtgtgccaccaggtaatgtgtctaagttgtaactgccttacgggaagaaatttgtgttctatgtttgcaaagtactaaacatctagtgtgtttcttgtgtatcagcatgcaacatgtgtatttgaaaatgttcgttttgttccaaaaataacttgatgtagtttagagaagtagtagttttaatttttctatttttaaattttttctacttgatttcaaaaccaggcctagaatttaggttctaggtgtaaactattggcctatcagatgtatgtctcttaaaaaactggttctttgaataaaactttttatctcttttaagcataagtgtttataggatttgaatttcacttccattttcctgtaatacagaaacataaaaactcatgtcatgtgtgctaattttctttcaaacagtaagttgtggcttcagtgaattgggaggggtgtcatgccacacaaagaaaaacgtcagaaagttttttatgaactatacttaaaaaatgttatagcaagtacagatgcttctcacttactatggggttgtgtctcaatacacacaatgtatgctgaagatattaaggagaaattgcatttaatacacctaacttacagtttagcctagcttaccttatacacacatggaacacttacactagcctacagttgggcaaaattatctatccagcccattttataatacagtgttgactctgtcatataatttgtttattgaataccgtgctgaaagtaaaacacagaatggttgtatgggcacttaaagtatggtttgtctagtctgtgtatcacttccgttccactgcaaagtcaaaaaattgtaagtcaaaacatcatgtctgtatatcatgaatgaaatataataatttgttaacattacaccatataaagcttgtgtgttgctactaagagcaaattaatattttatagtgtaattgtgatatatagtattgtatcagagttttgcaaactttgctcagaaatttatttcaatggaagaaatatttttggcattaaaatggaaggaacgaaaggaggaaagaaaagagtgtcaagaagtttgcaaactttattacatattataccctttatatagatggggaaatttactattggagacattaagtaacttacccaagaaaaagagcttgcatttgaactcagtatatctggactgcccaaaccaagagctttcatgagaaatcatctacacattaccttttaaaaatattttttatcactatagatagctttttgtgaattttcccaaaaaccattatgttaagaaattccaatctttctgctttacttgaactctcaagcatttgattttaggcatgtcacttcattttacattgaaatcgcccaaatgaatctctgactgtgacttgacacacacagaggaaggtctcattgaaacctcttttccctattttgggtagaagagtggtcatagatattacctgacaatctgtttcaactaagtttattttttcaaaaaaggaactcctcccccagattttagactgccttaaagtacaacaaacatctttactcttgactaactccaagtatttatttcttgctgcttgtgtgagagcaaatataaacatagttttatcagtgggcggctttcttggtctttggttgcaaacaatgatttctttttgattctcactttgtctctgactgttgaaaagaaaatggcaagatattggggctgacctttctgcctccaagtttttgctgtagtcacaaggaaaggtgacctttaaggcctctcccagccatgagcttgagtaaaccacacattcttggatccacaggaaatgaaattgtgaaggtcatctttcagcccagagtggcttgggaggggctcatattcattaattaatttgccttttatgatctcagaattaaggatacatataaagattgagcttctgaactgggaccaaaatgactgtagctttctaaaacttctgtttgtaggcttgggtttttcatattcacagagccatagaaacattattttaaagtatgttggtttaaattcctaaatcctactttcatgagaaagtatcaaacataatggcattcagctagctgccttactcaagacgtactgcaaaaggaggcgggatactcaggtagtattttctggtactttgcatactggaaagtcctccagtagcctggatctggggcctggattaaaaatgtgatggagttcacatttctaataaatctacacttgcacttgattttttttttttttttttgacagagtctcactctgtcaccaggctggagtgcagtggtgccaacttggctcactgcaacttctgtctcctgtgttcaagcgattctcctgcctcagcctcccgagtagctgggactacaggtgcgcgccaccacacgcggctaatttttgtatttttagtagagatgtggtttcaccacgttggccgggatggtcttgatctcctgacctcatgatccaccccccttggccttgcaaagtgctgggattacaggcgtaagccaccgtgtccggcctacaagtgacttttaattacagtttagaattggtgcctggtatcagaatgagttttaatttcagctatacttcctagtagccaggttacaccgggcaaggtatttattttctcttggactcagtttccttatgtataaagtgagacaatagtagaatcattttcatagaactattatgataattcaatgtactgttatatgcaaaacagtccaatgggtggcatattttaagtatgctctttctttaaaataaagttttatataccatagtatatattttaactctatgccattcattgcactcacggtctttttttttttttttttttttgtgggagagatacaatgaaaaggttgatggttctttaatttgagccatctgatgcacatctgtgcagcaattcctttgagttgcttatactagtgttttagttaaaatagttcccataggtgttaaaacataaattttcaatgcctattaccacttcttttgcccagtccatgtttctgtgtctatgtagttgtaggcattatgacaacttgtattgtgctttatacataggcactccaacatcagaaggaaataaaagctcaccacagtccccggcaatttaaaaattccatctctgtgcttatgaaccatctattaataaatgaacctttataataatgtctgatagaaaaattcatttacaaatgaatttatagtaataaagtatgttcttgccatttatgctgtttctgacattatccaaaaataatgtagagtgtgtgtgtgtgtgtgtgtgtgacctttcctttagaggaaaggaaatggagaaacacaagttagtctagtagagattgaaatagaaacttcaactaaaactcttggctttagaaggagagagatttgcttgtttatttcagttttgcagaaagttatttctctactctgatccctccatgcttgtggtgtgtccctaaggacccccttttctttcatattctgtcttctttgctttcttttaccttcccttttggtttgtttcttttttaattgctggcttcatggcacctcctttgaattaacctcaaatgtttgatttcttgaagcttgtgtgagcctgaatataaattatatcttctctttacacctttatccttccgttgcaaatgttgccctggatggggtgggagggactaataaagttctatttgttttgtacctaaaatactctgcctcacgaagaatgattcaggggaaaataacaatttttttaagttatagataaagctctgggcaagaattggatttgagtttgcagtattcaaaaaactagactatatggaattgactttcatactggttgcaaacttgacatcagattgtgaatgtcagattgatttctcattgtagatttagcatttatacattcacatctttcattcattggtaggtataggtaaacatttcagagaactgctttggatgcttatacccttgaggatttttctgaggaattatttttcagaagctctggcctagccaataatacaatacaaatcttacattttgtataggtttctccctttaataggctccttattcaaaggcacttgaagtgctctgtgacacagtctgataaattttcacattacacatggaagaaaaaggatgtaggaaaaaggaagaaagaggatattattgtcattgtatagatgtaaaaccttgcattttatgtatagacctaccataagttgaaagcaagctatgatttggagtatttttataaagacaatttcagtaaaatgtagactattaaagaaatagtttcctgaaaaataatgggattattattactatttttttttgtcttggtcaaattcctgctgtagttctgtggagccagtgtctcaatgattatattttttaaagaaagacaaaaacttcacttccttaacattttttaactctaagctctagtgtaggagcaaacctaggatggtttgaggatacagtcaggaaagtttttaaggaataggaacagaagaattgtatttagggatttgcaacatagagacttgtacagtctggtcacctatctgtccacagatttcactcccttccaagagaattaatgatctaagagcagaggtcaggctttaatcatctctcactaattatgtgaaggcaggtggaaggagatttttggagtagttttatgtgtactacccttgtgggaagtttttgcattccagaactgaggatttgggcagcatttcctgtggtttgatccattttctgagcgcattcacaacccatgggccatcttttatgcacccatccttggaatttaaaaaaagtgaatcctagaggttgagtgttgatcaccatattagcttttagaatagtggttatgttgatttgtgcctgagagctaatgagaaagctgattctcatctcctgggtccgtgtaaagaatgttggggtgaaggaagtctagccactgaaataaaatgtacaagtgtggtcgcccatactaatctccacctgtgacccagcagccacgtcttgcctggcccgttttcttgcaactttaaagctttaaactggctccccatgggaaatgactctcgaaagcccctgtcttcctttcctttggctacagcatgtagacttcatgaactcctttttcccgtgtttgctaatgtcatgttttcattacctccatgttgtctcttctgctctatttaatttttgttcccacacctgggacctgatgccaacatccttaccatctcagatcctagatttaagtttctctgtttgcatgaacgcatgccctagaattccttgttctcctaaatgagctctttaaaccataaaaatatacctatgagggtcacagggttactccatgacatcagatacacaagtgtcttcctcctgttgttcatctttatttaaagatttcatttagaaaccttattctctcaacagaaaaatagtctatttttaaatggcatgcacaatccatagggattcttaattttaaaaaatgatccttaaaaaattttgcacatggggtggccacgcagggctacccagtgcacattcctgacaagtaggggatgtgtaagttcatcctccgctaacgttagggataatgtcatggaaaactttgaaaagtggagttaacattgaggccctgtaatattttgatattactctgtgtgcttttttccagttcttctgaatcccagtcctttttctcacttttcaagttacagcaagtgcttttatatgcattatcttcagggtagggatgatatagaaagaaaaaagactcaaatttggagctttgagctttttaaatggacttttgtggatctgtagaagacgctgcagtctttgaagctattaattacaacagtcaggtgtttgaaacaaggaaaaggcaggtactttgaattgtaaaagtttgacattaaatatcaagcttagaggcttcaggactcagcctataggactgaggatggagtgtaaagaaagggttgtctcgtagctgctctcaaggagaaaagttcaatcaggtgatgtgagaatcttgaccaaagcctagatgccaagggagatctgaggaggggcacctcctctgccttctctgggggcaaactcccatgcagcctgataggtgtggggacctgagaacacagggaaaccatagcccagtctctgtctcaggcattcagaagaggcagttaatggagcagagaagtgtcagtggggtatgccatcaggccagcctgaaactgtcctctgagactcccatggcctcccaagggtgctccagagcagctaaaacattttcctgccctagaaaggacacatgaatagctgatggtataaaagggagcatgaaacatggcccagtccagtgctatgagcagagaacagagagatattcctgcagtgaggataagcttccagtgggccttgtatacctggaagtaagcagctcttcttgcttaaaagtggcagaaatgtgggtttgtccttcaatccaaaccacacagtgcctttctcctcttcagagtcactgtcagaggccagtgtggctttgtgccttggccctctagcttccctctggcttcctgcactgaaggcctgagaggattctgcatggattggctttccctcacctcatggaaaacgcttgatttttttgttttttgtttttgttttattgcatttcagaggctgaattagggccataaaataaacttccaagaaattctttgcatgccctttctctacagggaatggcactacctttaagctaaactgatcgtgatgtgtagggtgttagttgtccacagtgcacgtatgcactacacgcatagctttcagggccctacctttaagctaaactgaccgtgatgtgtagggtgttagttgtccacagtgcacgtatgcactacatgcatagttttcggggtaccagtttatgcctatggtagtgggaatgcatttttctcaagctacaaacttggatttgcaaacaaattatgtgatactatttaaaaaaatagaactcaccttagcttagaggttccccatctgctagtgtgtcttatcaactcaaggtaattaattcacttttggtttaaaatgctttcttttggttaatgttttagttaatgcaagcctctctccacatcccttctctcttctcttctttccaagggtcagctgggataaggagaagtgtctagagggcccaggatcagctagtccaaggccaccctctgtccttttgtcttccatggggatgtgacatcctactaggtcatgaacactgatttctgtctctgctgtgccctctgagatgaccatggtcccagtgtcacatccacacaccctgtgtctttcccgctctaacctcaagtcttccagtccactggttctctcagcccttccacacatgcctcttgggtgagaagagccatggatttttggctgttttccctgcattctctgagattgaggaagacactatgtatgaaacattccatagcttcactgcctacacgctgttattctgccattccggagacagtggcatacaaaatgtctctacaagtcttatcacctcctggcccttcaccctgtgaagtaaaaatggcattttctgtccaggattcccttttaatttttctgtggtttctattcttcttcatcctcccaagtgtgaacttggctcagagatggtaagtggtttaggaatagcctcctcacagagattaaggtagtatctaacctttgtgactttcctccaattttctctttcctaatggtcagaatctggtctggggtaggtaaatcaggtagtaaaatatcattatctctgtttctccaaccttagccttttgggttttggctctggccaattatagataaacttttttgaattataacaacttacatattcaatgaaacatctggatcttgcaattaaaaaccatggtttccaagatttttctctgtgctacaaatctgcaaggactacttaacatctcaaaagctaaaagtttaactcatttttagtttgagaacagttcatataaaaactcccatacttgatggtaggaagaagggtagggataaaaacaatagaaaataaatgcactctgtcctctttatttctccttgtctgtctttagaagaaacactaagttacacttacagaatagagagagtcttcctatgaggtccagtctcatttatcatcctcttttgtgaattgtgaatgtgtattcatttctacagcttcaaatagcttcctaggtacgtatctcttttttgtcttgttttacctggtctgtaggctcattaaggtcaagaacaattctacttctgtaaaattcactctgtctgtaatgatttgcttatgattcattagatgggaaccttcttgcttcttgatgtcatgatggctagtggggccattttctctatatccaggggaggcctttctgccttgaagtactggcaggacacagtcattctgatggcaataagaatttcatgtgtccaagagagacacataaccatataaagaaatgtagaaacaaaaatctctttttatcactgcttctatgttttttgtttttatttccttcccattttctactagagtcaaacaatattgtggttggcagagaacttcaaatgcaacctcctcattccacagatgaagaaactgaggttgagggaagtaaaatgacttgcccaaagacacacagccctttagcagcagtgtggaaacctgagttcttggcatgtgattcccaagtcacctgtctattgggccatgcccatcgttcagagttcgtttggttgataagacaacatcaacttgtatattagaaacgttatttctaaattgatgttaattgcttcctggcttttctaataattaatgaatgtttgagttttcaggcaaaggaaaacctctttgcacgattacaaaaataacctaattaaagagacttttgcaaatcacttgctaaataagttgatccgactccagagaaatagaactgaagactcttggaagcatctgataatatgccaaggaacaccgaggaaagataaataccaaggttgagtgggttatcaaatgacagtaatttcttggtttttgtggctggtaaactgatcaggactgctttcatgtcttaggttgaaaaatcagaatatttgaatattttaagtctaaaccctccagttgaaaaactggggagaaagacaattctggtcaagttaaattaaaatattttagttgctagggggaaatacagtaactttattccatcatccaggtcttactcatttttgtgtcttatctggatgtatgcattgcaacatggacacacattgttgtgtactttgggccattagccgtatttgggctgacaacaacaaagttcaaattctgcagggtttcaaattcacacactgcatttgtaatgttgactttctatcacaaggatgttcatatctttgcaattagaaattcttagaaaatttgattttcttagaaaaagcaaaaatgattttcttagaaaaagcaaaaatgattttaaaatgcttgtgcatatggacataaaattccataactgtgagaagcataatgagatgtttcctaaaggcaagttaaaactgcagcatcaagcagaatttttttttattatctacaagagttaattaataataccatttggcactgttagatgttcagaaaatagtctaataagtaagactgctttgctttccttttgctgttaaaggctgttcagactctctaaattgcttactaggaaatagaccttgtggtataagggtcatgtgcttggaaactaattgggattcattgtagtactgcattgccacagatggctcatacagaacataatataatatcagtcaaatgcagtgaggtatttggaaataattttccttggataggtttataatcatatgatccagctgattttcccaacggcaagattcctacccaccatgtattccttaaatagctccaattttgcttgaaaaactctctaaaataattcaatttataattttagtttaaaacaaagtaaaatataaagcttaatttttttcccttatttcattaggttagaagcaaacttattaggaaacaaattggacaacactatgtttcattgctgttgatgcatttgttcagtctttgtttgtttgtttattgatttatagagatgaggtcccaccatgttgcccaggctggtcttgaactcctgggcttacaggtgtgagccaccactaccagccacttgttcaatcttttaatgcctccctgctctctgctaagcttaaacagtatttttcaaagtataatccacagacaatctgttattatttaacaaaaactcatgctcaacagctaatctgaaataaaactagtaaaaccactatattcaagctagttttaataaaaactcatgtttactatctacttttaaataatgcaactaccgttaggattgttggggaaaaaaatgtaagaaaagctatttaaaaaaataaaaataaaaacacccttgtattggagatccttttaagaaggaatcatgtatgtgacttaatttgggaaaaaactgctacgttcaagctaatttttatgaaaactaatgtatacaactagttttagtcattcactttcaggcttcattgtaaatgcagattcctggactcttcctactgaggagaaaggtcgagaggtagagcctgtaaacagcagtttggataatttccccaggtggttctgatttacaccaaagtaggagaactaataatgtaaacataaagcttgaaaaaaaaattgttttcctttcatattcaagtcttttgttctacagttcgcttgaaatgcagtggttcctggtcgggtcactgtggtcttagcatccattgacatgatggcaagaactggttgagaatcagtataaagggagaaagagaagagtgtgggctgggcgcggaggcttatggctgtaatctcagcactttggggggccgaggcgggtggatcacctgaggtcaggagtttgagaccagcttggccaacatggcgaaactcctgtctctactaaaaatacaaaaattagccaggcgtgatggtgcacgcctgcaatcccagctactcaggaggctgaggcaagagaattgcttgaacccaggaggcagaggttgcagtgagccaagatggcgtgactgcactccagcctgggcgacagagaaagactccatctcaaaaaaaaaaaaaaaaaaaaaaaaaaaagtgtgaagaaagtaagtacttgagatttctccaggaaggaagggtacagagagagcaataaactgtctacttgataattctgagttgatctagctctatagttttaaaactaatcatgatatcaattgaatatcataaaatttccacctcaaagctgtgcaggtttttcctgaattctaagtggaaagggtctgtcagattgaatgccaaacatgtgttgtacatactgcataggattagtggctctacctctgcaatcaatcaagcaatcaacagcaatgatttattgagttctaattatgtacataagtttgtgctttagcttagtggttctcagcgtttccagcacattaaaatcaactgggcatctgaaaaaattaccattgtcatgccccaactaattaaattagaatttctagagacgaggtccagagcttctactatagatcttcacatattaccagtttgggtccttctttcgagtgcagtgacctctgccattgatttgtaatgcttgtacaagaaaaactgctcttagagatagagcttgagcctctaaattagaaaaccaattttctaaaccagattccattttaagatgcttgataaattttagttactgcccatgtgaccagagaacaatacttagtttctccagaaggtaccaacagttgttaacggatatatattaacaggacttttattaattatttcattttctatgccatgattttatttaattatcatagtaaatgtataaagtccataatattaccttcattttacaagtaagaaaattgaggcttagaaatttactctaaagaatacataattatttattgagtggctactatgtgccaagcacaatgcaagatgtcttgtacactattatgggatgagattcacatgatcatacctgtgttcccttgaggatgatctgtggaacactggtctgtcaagatgctgtggggaaaaaaatctgcaatctaataggcttcagaagtgctgaatacttttctactttgttgaaaattctcaatgcgcaaaaacttgtgacgcacactgagatagcatgtagtaaaggaacatttagagtgacgctctatgggttatttaactatgaaaattctatttgagaaacatttgccaattgaacacattttgaaaaacacccctacaaaactttgtgttccagaaattttgtcccactgctacatattaagaaattgagactgagaagtttggtaacttgcctgcagtcattcagcatgtggctctgctagaacctgaatctaagtttggctgttttagaaaattttcttctgcttctaaaatctataactacaggtcgatgatggatatctacttctctgttagtaaagctgaatttaaattgttgaaaggatcaaatgtaatgtatgtgaaaacattttgaaaactataaaataatacataaatgtcagaattaggtagtatacagtctaaagtagtatagaaatattaacttttgaaagagatcatttctttatccaaatctctgaattacacttttaagtaatagtctctgcagaaagttaagttttgtcagttattgttaattttgattgtcaatacttcatcaatcacacttgaactcttttggtagcatttttggtttattaaattgtctttgggagagtaaacttaggaaatttgtggtttctatatactgaatccatgaaatatgaaactaagaataatgtcatattcatcccaacatctgattctattgattatgaaaatgtgaactctgacctgggacaaatagtatgttgcttctagtttaataataataaaacaatgttagtgtaatttatgatattttcttctgagtacatttctttaaagaaggaagcaaagctgagaaacaatcaggataagaatcaactagtcaactttcctgaatatgctttactggagaaatatacagttgattggagaagcctgtggcttccaaaactgggagccatttaaagctaagcaaagagaaggtaaaatgctgtatgattgcacagatggcatatctctacttcaaggaagtgctttaggggatttcttgatatgtcaaaagataatcccattaagaaaagaataaagaccaactgatcccatatttagaaaagatgaaacacaccttcaactctcttattcactagtgaggaatcatcagatattctctgtcacaacaaattaaatgtgcaagaggttttttatgtcacctggttgagttagcatggaaattatttacagcactttgaatgcagatggaaaatgaatctacagagatctgtaactaatgtgtatggacattctttcctttattttttccttcttgcccgtttccccagaatactttaaatgaattaataataatgatggatccaaagaaataactgtgaaaatggtgatgttcagaaaagattgttccaagaacaacccctctatctagggtaagtgggaaggaagtgaaataacatctcgtagaaagatgttcatcaatgcaaagtgagtggtaaatagaaatgaattagtacatagcttaggactttgctgggatcttcaaagaagtactatatagcttgaaaaatatcaccattccttagagactcagaacctacagaagactgttaaattctacaagtaaatgttatttgagagtttgaggttaatgaatttctgcccaggaattattcttgactgtgttctgtttccatgagtgatgttcaacatagctagtgctcttctgtgacaccagaggtttcaagtttagttttctttctgtggatcacggtttttaaatctttaaatgctaagacacttttgagtctttgtgtaaataatacattttaaatcgtggaatcagtttcaattaaaaattaacattgttatggagttatgtgtgtactgttgaaaaggtaagggttttgggtagtttgaaaatacgcagatctacacaatatatgagacagggagaagaaaagaggagggaacaaagttcacaaagatgaaaagaagtccatagaattagcatcgtgtttccatgctttgccctgttgaaagtctgaatctcctttttcatgaaggaagagttacttatttttaatgcatgaagatagaactaagatgatgagtgggacagagaagattcctgtaaatacacatttctagaagtctttatacccctaatatgcccctgcttcaacatacagtgcaagtatctttccagtgtattcatttcaatgtctagaatacatgagttttgctatcctaaaggaatagagaattgtggctatttatgcttagcaaatacaaatatcaacaacaccaattagcaaaaacattttctactgggcacatctttttttttttttttaaactgattacacagtatgaactgaggactgttttcgaatccctctctcctctcgaattaatttaccacattctaaatccgtagataaagtagttccagaagtggagttggttggatgggtttgcttacattgcagtccataaaagaaacaaaaagccttgcatgcaaaagaaatgagaaaaaaatatagaaaaatgaataaatcagaagcaagaatgaatgtttaaatgaaaatttacatcacatgaagctggcaactatgaaaagcacattaaagcatcatatatacaagcttttattttccaaattagttgcataaaacaagacacctcaagagcaaattgaaagttaaagcagatcagttcattctccctttgaattaaagaaacagcttcttataacaagagctttggaaaggggtgttcattgttgtcatagttgccttgtaattctggggaagattttcatgtgaaaccaggttataatgaatcatccccagttttgggcccttaaggagggcttccacttaaagaaagtggatctattatcagattattaatcagaaccagccacataatttgcagggtccagtgcgaaatgaaaatatgggacactttgttcaaaaattatttagaatttcaagatgacaggagagcattaaactggctctgtcattaatagtcatagtcttaaaattctaacaatatttaaaaattcaaagcagagcctgattcactatgatgaccataaactttatattttgtttattctagcatggttatgaaggaattatcttaaatcacaatcagccttttcaaaagagtgtaagttgatttccttcaaaaatggtgtgatttccttcagaaataaaagtagtaggcaaaaatggtcaactactaaagttgtcctataatcccaaacacaatttagaaaaataaagtctcatatacattgcattttcattttgtattgtttatgacattcctggcaaaaaaaaatttgaggtgatatatccttttacaaatcttactttgatagaagtgttcaatttcgtagtatgacttttacatatttatataaattgttttgcattagtacatgtgctcagaatctatacttaagggctggtaacatttctgttaaatatctttttatatcttttccaattttggatttatttttgcctttttccatctagggtttctatcttacgagcaaacaacagttcaaaaattaactgagtttggaatttctgcactgtctttccaaataatgctaattggatttagtgtataagccccttccttgtcgttaataaatgatggacctgcagtgcccacagcacctggcagggattcaatagctctctgctctaactcaaaaatggctcttctgggcatctaattcaatagactgaaaaagagcaaacatccttaaaaacccccaaacttaagacagataatgcaaactataaactaaccagtcctagaaagagatgactcacctgttcaatatcattattcttccgtgatttgtatatgaattctccaatagctacaaatacagaaaggaccagtccggcagccagaacaatgaagatgcctccaatattttccactcccagggcactggcttctttgttgtcttcctcggggcagccattcccacgccaccacttctctttcatcatatgcagcttcccttcttcttggagttgaagaatagcaatagtaattttatcccggtaaggagaacctggaagtaaaaccatctggatattggtcaccaaaatgttgaagaagacatccagaagtattcttaattatcatctttgtcataactatgttacggctgttgtgagaccccaatccacaaattgacttgcaaaggacaggaaagttcactcctatattttgaaggcactatataattggaaagaagatagctgacatgttgagattaactttggccccgattgtttgctccttttaaataaggagaagcaaagctaggaattctatgacatgtctttgtttctggtgagatcattatgagtcttttcacatgtcaagagatttcactgtgtaagctaaaaataaaattctaagcccccattgactgaacgaccctcttttgtaaccaaagggaccccagaaaaagcttaagaacttagtttgcagccataccggaatgggaggtcagacagagcagtctatttgtggcaataagatatcaaattataaacagaactgaaggccatgccagacaagggttaagtcacacagccttggacttaaaaaataaactatgctccaactgctacaaggcttttctttttctcaaggaggtaaacaagcactggcctcaagataagcaatattaaaacaactacagctcatccaactcttagacactgacttccagcccctgttccaccagatatacctttcattaaacaagatcctgatttcagtaactttctccagagaagaagaccaccgaccttagactggttctggttggattaaagagagtgtacccttgcatgccattgtgtcctgcaagacattttgacgtatagaacctaattataaaaccattaaatgttaagtctctaccccgaagtggacaaggattgtatgttacatgcatttttgttcaatatgcatgtgtcaggatcatcttcataaatattcatagctccgcctgtaaccagtttaatatgtatgtttagccaacccattcggcataaagctcttgccccaacccctcttttttcaaagtgcctgtctttgatcttggttggacacatgttttccagcctacgggatgaccaccttgcagattgtcaccctttaattatgaagaaatgaagtctccatttctactttccaaatttatcgatattgtggttacattttttaagttagcagttatttagaccttacttttttctaggctctttgttgtctcatattgtgactgggcttggctggatgaccagcagtgccatttcttcttctgagggggagtaactagacatttcccacctcccttacagttcagtgtggttatgtgactggtttctagccaataggaactaagatgatgtcttcccaacatgatctttggctctctctctttttccaaatatatagcaagaaggaaaggatttcaagtcactaggaatgatggaaccacaaaatagaaggaacttgaatagaaggaactttgaatagaaggattgaaagaaagcagagcctctctttcaatccgcactggactgtggcaagatcaagaaattaacattgaatgtgtaagccactgaaaatttgcagatgttggttagtacatactgattaatgcacctattaagataaacttaagagtaggttttgaataattcaaatatcctacaaaattcaggtaggtttggaaaatttgcaaggactttattaatattatttattctctatctcctagtaatgccactgaacttttaattatgtaagggttggaaagtgccaacatctacctgtagacatagcttctcaatactggattttggttaatcaatgcaaaggaagaggcaaagtaagattctttcaattaatctgtccttgaatgtgaagaactcttgttagcatttcttctactcagtagaaaagtagtacaccctggttttctctatttgcaaatgttaaagtttttcttggtggaagcacattgataaatgaggcatcttaggactagaagaaatcttaggaatgatacagtccagtccacttacagttcagtacacattccattttagaatggaagaaatttaggaactgaaagtatgagtgaaactgatagttgctggcacagccaagaatcaaactcaagtttcctgacttcttacttttcagtgttgttttcacgacagtgttcccaaccattactcccacccctacataagccttatgtcctatggcatggttaagttagaaaaacagaaggttaacatttgtgtcatttgttatcagttttccttgtaagacttcctgaaataatcgtcagcattcaaaagcaagtttaaaagaagagcaaaatgctttggagtgaaattatggcttatcaagagtatgaatttttggtgaaaaaaatggatattgaaaacaaaattaaaagatattggctgtttgcttaaatatcctcagaataatggctagtgtaaaaattagcaccattgatatacccatagcaggtgagcaattaagtgaaccaagagcactttgctttaatgtacatgaaagtgctttgaagagtgtaagaatgattcttatgttagttgttgcagtaataatcctaggagcatacacagtgggtgctcagtaaatgttgactgatgctttccttctgcctccaggctgcgcaatacctaaaacatttcagacagatgaaaatctgatctctgtttaaagttggtctctgagaaagataattttcagcctcctggtaagctgttcaaaccttaaatgctcttattctctcagagttttactttaaatctctcaggaggtacatttccagagctgttgtcctgagtgtctctaagaagcaaagtcttcaattttgtgttgtgactctgccaatctttgattatgggacagagcttgcagccataagggagttagtcagggcaagactagaagtgtacagataatttttaatatctgaatatattttaacttaagtttttgttgttgttgcttaaatgaagtaaatgacattggaagttattatgtcacttgaaatatatatatatatatttcatatatatatttcacacacacacacacacacacatatcttcctgaatagcaactaatcttttgtaaagagtcaattcatcataaaagaaacatctcacaaatttttccaacagctgtattctcaatggatgtattctccatgaggtctgccatctgttccaattattccttcattgtttttggtttaaaagcatgacaggtttacaacaactgtgaaaaattcctggagtgtatttcttttcatctaggaagtggggaaggcttttcaactttggaacttgggtgaggttggccaaaaggagactgaatgggtacctttggatctctctgtattatatgtatatttatatatatatttttttgtattatatgtatatttaatattaatggtactcaacactaggtcagcttcattcgcaggaaagcaggtagcgattttcaaagtgctgcattcatttaggaaagtggtaggaagaaatgcattgttccctcctacctccagccctgcgtcactcactgtactatcagaaattttagctttcaagttatattccatgctgtagaaggaatgtcaattaaaagtctcatgttaaagttcaaacgttcttaggagagatgatacacattgttattttaaatcattgttaacagacaggaattttggtgccaaaaaggggtgttgaaatgtggtggggtagggttatgaggtgggagatagaatgataaaagcacagtttttgactttataatttagtctagagatggttctattaaggaactatagttactcctctacgagggtcttgattctgcaaaaattcaggcaaaggtacctactcttggtgttctcatctgatctatggcccgtttaactaaaatcagcagtgatgagatataaaaaatagcatctaacttctcccacttttattatctaaaatgaggtggtgaagcttgcttggggcaataggacattgttttgaaagtcaaaaagaggtataatatcctgttagccagtgccaaatgattccctgagcctcttggaaaacatgttgactaaattataggagagcttaccacttggggcaaaatatacacttcactagcgatattagtattttcatcagtagaagttattggaaataaagaagcaagaaggtagctgtaaatcttctagcccaatcattctgcaggaaagttatttggaggacataaatgataacaataataataaagttaatttctccatagcacatatttctaacaccaggtagttagcaggaagtcacattggctgtgtattcatggtaaatatggaagatagttgaactttatctgattagttatattcatattaattaaaagttgaatatataaaatgcagctttttcttttttaatgaatttgttgctaaataaaaacattaggacaattcacctaaaatctggattttttttattttcttagaaaatggaatattccacaatcttgttctcaaattcctacatgtctacaactctctgacttgaaaggcagctgtctcttttaggtatgtcatgtggtctgtaattttccataattgccaccgttccctactacctcctggcacaagcatgctttgctcacttatggtatctgcttggcctctgtaagcattttagtttgtgatccctgcatgatgtggagagtcatattggatcatccctttcaaatgacaaaaatactaataccaacaagcaaatcaaacctacctggggtccttaacgatatggcttgactgttagctatgatttctggacttgcccagtagtctagacagtccctgattcttctcctttggaatgcttactaacaaattaccaagggctcacttgggaagagcaggttcccactataccaggaccttatatgatacagttttctttctttctttctttctttctttctttctttctttctttctttctttctttctttctttctttctttctttctttttctttcttccttccttccttccttccttccttccttccttcctttctttctttctttctttctttctttctttctttctttttctttctccctttctttccttcctttcctttctctctctccctttctttctttctttccttccttccttccttccttcctttctttctttctttctttctttctttctttctttctttctttctttctttctttctctctttctttctttctctccttccttccttctttctttttttgagatggagtctcgctctgttgcccaggctggagtacagtggcaccatctcagctcactgcaacctccacctcccgggttcaaatgattctcctgcctcagcctcctgagtagctgggactataggcacatggcaccacagccagctaatttttgtatttttagtagagacggggtttcaccatgttggccaggatagtctcgatctcctgacctcgtgatctgcctgccttggtctgccaaagtgctgggattacaggcgtgagccatcgcgcctggccatgatacagttttctatagagagggaaaaaatagagagggagttttctatggaaaggaaatcactaattaccccttaaattctattcatgtctcctatagacgtacaagaatgcattgctatatgggtctatatacctaggcaataatattcctaggagagcaatagcatggaactaaggaatttgaagattttacatagttggcattgattgaatgtaacattgcctgagcacatcagacttataatttaatctttatcctttttcttttgactgatatagccttgctttttcatctatcattatggaacactagccctctcacttttgctgtccatatgcagaatcaactttcttctattctaatttaaggcagatacattatataggcatatatgggtattgaaggaaacaatgtgaagaggattaattagaaatatattctctttaagatatttggggtgaaataataaaatctatatattcttaaacatgtgttggtaaaacttgaaagacacactggttaaaagtatattaagttaaatatctgggaatctgtaattcagactatgtctctgatctatatggatgtttacattattagttcactaatggcattgtaggccttctcagaatttggaataaagaactctgagcccattgccttctatactggtaactgacattctgtatctcagtcttggttcatgtctacccgtcttaccaataggtgttcccactccgtaacctttggagtcaatgaggcccccgatctgagtgaggttgcagtttctctgcgtcacatactcaatgctggtggactccatcagcagcgcgtagtctgtggtgagcactctctggatcccctcatcactgtttcttaccagggcggtctgctgcctgctgctcatgaaagcccacatcttctcataggtggagatttttgatttctggagggaaagaaaacacactcaccagcagaagagggctggaaaaatacgacctaaaggtattcaaagtcccaatggttcaaataatgatagggaggatactttctccacaggtgggggagtcaagattgatgatctcaaggcttcacttttgtagctgagaagagcccagttcactcactattggacagcatttgcacggaggcagctattacatggagaccttgatctataagccattgtggcccactgggctaaggggtgactagctcactccaggactctgttcatttcatgcattttcctttcaatcactcaactccagcaggtattgttttgctgtttccaggtgtataagtttcaatccttgatctagcattcttctgctggggagagccctggagtaaaccactgacttcctctgctttatttgtgagagaactgtcattcactcttctcttttctagaaaacccagaatgtaaatgctcttttcaaattaaaatttagataagaaaaatcttcagccaggcctggtggctcacacctgtaatcccagcactttgggaggccgaggtgggcagatcacataaaggttaggagttcgagaccagcttgaccaacatggtgaaaccctgtctctactgaaaaaatacaattagccaggtgtcgtggcatgtgcctgtaatcccagctactcaggaggctgaggcaggagaatcgcttgaacccgggaggtggaggttgcagtgagccaagatcgtgccattgcacttcagcttgggcaaaaacagcgagactctgtctcaaaaaaaaaaagaagaaaaatcttcatactgtatttatatgcctttttatgtgtataattttaattgtaatcatattttagataatggggactgaatatctcatttcaaagtgttctattaatatatttgtcttttctcatattcttcagctttttgatagattcagtaataaattatatatgttatgtaatatatgcacatatacatatgtaccactgcttcattatctttttttgctaaagtatactgcctaaattttcatattacttaaatatgaattttccattcttttgaatagtgatctatgattagacattttgcattttactctgtaatttccatacagttccaatttttttttttaatttttcttcatttgcatcagcattctccacttatttcagagatgaaaaacattatgggaattattggtatttttaagctaaccccagttatcacagttatatatagtgctcgcacacattagacaaatcccttggcaggcacaggatgcaccatctccgtagttcaggaaagcttaaaacatggttttgggccataagcaaaaaatggaatacctgcggagtcaactctatcacggttattcatgcccaggtgttcctgggggccactcaattccaacctctatttaggacctgggttaatactgtagggtttatgagttaggggaggacagatggctttatttcagattgttaggcattgaaaatccccctgagaaaggtcttgtgagacaaataacaattcaataaacagtaccttatagatattggtattttgtggaacccattgtgtcatattgggcccctgtgagttatgccacagccccggagatatctgcaagctgcagctcatgtccccataacaaaggcgtgttttgggggtcaggtttactgcttcatttgttgtgtgatttcagccttgcaaagtctgataatgctaaacttatagtaaaagagctactcatacaagcgcagaaaggtcagtctatcttgtggcagtaaatgcacagctgcgaaaattattcttccatcaggaaactaccttaagggaaaataattttctttgaagtataaaatttaaagttgtcagagactttagagatcggctcatacaaactgctactgtcacagaggaggaagttttagtacggaaggctttgagacttcaaaaagtcacaaagcaagttaataccagagctaattctggactccagcacacctaatatctaattcaatgctctttccactgtaccatgctgatttgggggaggtggatgtctatattgccaaaatgcttttgagaatgattttaatctcatttgatctacatgtgaaaatatagcttttattcatggactcattattccctgaggtgggttgctagttagttacatattaatatgaaataggaatcaaccttcacatagaaaaattttatgaaacattaaattttttcaccacatttatttatttatttattttttttgagacggagtctcgctctgtcgcccaggctggagtgcagtggcgcaatctcggctcactgcaagctccgcctcccgggttcacgccattctcctgcctcagcctcccaagtagctgggactacaggcgcccgccactacacccggctaattttttgtatttttagtagagacggggtttcaccgttttagccgggatggtctcgatctcctgacctcgtgatccgcccgcctcggcctcccaaagtgctgggattacaggcgtgagccaccgcgcccggccgcaccacatttatattttattaaaacgagtgttgtaaattgttagaaaactgaatttgtggtttatggaagtcaaaaacaaagtcaatgtttagttcatccacggtaaatggagaaagtgtggggagtccttcatttcatctggggaattgaaggatatgggaaaggatgacacgattcaactctaaacctaaactatctgaagtgaaggacttcattattttcaatctatggcagacctagctttggtcctcctgcatgggacgaatatgtaggtcataccacctgtgactcactctgtgagtattcaacagtatgcaggtggtctaatccacgggtaagagaggtcatgagtttagtgcaacctcagtattcaacagctgcaacatttctaaacgcttactctcagtattcttctccttgtcacagcttagtaacaaaatgtttcctgagccagcacactcttcacactacactttgagtagcatggctctatggaacagagataatggatttaaattcaacaacatccacatcttccttcttggagtagaaggttgttctaggcctgacctctcccagggagctacaggggaagtctagttggcatggacacctttgagcagggagggcagaactttctctctgacagaaaactgttacttggtaggggacttggtaagttgaaggtataggaagtgttataaattcctttgaccccttgctattctcactagagcacagtaatagtaaacataatgggagcaagaagagcagcattttgctgttatttagagctctctttcgtcgtttaaaaagtttgctgttgtggggctttattgtgtttcacagttagagttctaggctacttgggatgctagggaaattagagtttgcaggaagacccaaaatgtggctaaggaataactttttttaataggtagaaatatctgcagacagcttcagcaccttaaaggtgtagtgagctttcttttttattttttgagacgttgtttcactcttgttccccaggttagagtgcaatggcacgatctcggctcactacaacctctgactcgtgggttcaaatgattctccggcctcagcctcctgagtagctgggattacaggcacctgctaccatgcccagctaattttttgtatttttagtaaagacagggtttcaccatgttggccaggctggtctcgaactgctgacctcatgtgatccacctgcctcggcctcccaaagtgctgggattataggcatgagccaccatgcccagccggtatagtgagttttctatcactaggcaactgcaaggagtatgtcatgcttagacgagtttcacataaggagatgcttcaaccaccacgttctactctctagaccaaccccttcctatcacatatgcaggtcctgaggtcagggacagcaaatgacacacagaaggtggcagagggttagtggaagagacagcacagaattgagggctctttcttctttactgcagagttctgtccgctgcatgccacgctcagtaatgtttattttttgttagataaaaaagtagaatgttgggagtaaattacatgtattcctttcagcagactttttttcatggttgagtctcaaatcttagtaattcttaaaaataggattatacttcatgaaaaattatcatacatattaaaagaccaggcaaagtgttaaaatgacagcctgggtgtttttgtacttctaaatcacatataatgtcaaccagtctcctaaatcactctaaataatatatgttccaaaaacagaaatagtggttgcctcttatttcactagatatgtcaaaagttaattagaatatttggaatgtcttctgagcttcttagcaaaagttgctaaaactgaaaaagcctcatttattaaatctgaaatcacccaggattttttctttttaatcctgagaggcatctgtttagataaatgcattttatctgtttaaatctgattatgtggctatcctcatgctgatgaaacattgttggcaaagaatagcatttttcatctcaaatctgttataagggagtgttactgcatcaatgtttgatgaacattatttatttcttttttccccctataatacattcaagttaaacactcactgggaaatagtttataatgtttgcaggcattaaaaattacttattgaaaatagtaacagcaaccaacatatgcagtgtttatttactgtgtagcaagcactattttaagaactttgcatatattgattaatcgaatcttcacggtaatcatatgaaagacgtaccattattatttctcttttatagatgaggaaatagaacagcacatgaagaaatgaggaaaccaggatttgatcccagtaatctggttccagggtctgtgttcttaaacaacagggaatgaactatctcttaatacacagagcagcaaactcaaggcttggctaatgtttccacagctaatgtttccacagaattaacaaattttctaaagaaataatcgaaacaagtagctgtgggatctttctattatagccagagctgttgtactcatcatataatgtacagaaactatttacctgacttttaatagcttacacttgtttagacaagaatttagacagtgttttaggaagtgcaacagttagaacctggaaaaaatgtgacttgtttatattgtttcctttcctttaacagtattttgcttttcatatagtttcactgtttttagttacaggatttccatcacacaatgtaaataaaatatgtgcaaattctagggtgtagtgtggtcttaagcctgatggactccattttataaaatatccctctaatgtttcttttttattgagataactattatttatcacattatttcttccaccagtttttataagactttcacagttaggatgtataatctcatttttcagtagaatcagtaatcatgcaattctacttcacactaatatggctgatgattttatatatcgatctgtgtttatgtatgtttttactctacacactgaaatatacattagaaataagttattgatatttgatctttttatcttatcaaaagtgatcttataaatgtaaatatatgcatatagaacaaatgaaatatcacaaacaattatattttaagatctccaatttaattttactttaggcaaatcctgatttaagacaacccttaaaaattaaccaaagacatagacattggctatgtagaacttcatacttgcgaaataggtacatcagaggtgaatagttgccttaaaaacaaccatttcttttagacatgattaatatattatttcattaaataataaattctcatgctattttgaaaatatgatttaatttacaaaaatcgctttgaaggaagatgatcagaagaaaatatttatagtatagttaggacctctgccttccaaatgtgtataatatgaacactgcagttgattatgtctttatcttgatttgatgaaaagttatgacatttgcagactctccaacatttaaaaaatttatggattccctttagaaaattccctcagcgggatttaaacagatttgctaaaatatttttcatgtttttctcctgtctagagttaaagattggtctattacaggcaatcttccagcctttgaaaaaggttgaattgacctcatagatttcttcccaaacaaatacacttttaacctacagagacctaacatttctgacactgatggtaaaattagctggatttttccaacataagctaggaactcttatgtgaagagtgccttcctatgcagagtatttgagaaatggctttcatcttctgcttcctgaaatggttataactgtctgaaatctgtctccctacaatggctcattgcttcatttccactggtgcagtgcccagtaacttctctgaaatgtcttttgggttggtgacagcacctaaccactccctggaaagagatgataaaggttagagaatcccttgttcccacagctggtccaaagtccctagaccatgaaagccagaaatgacaagtcttttatgatgttttaaaacctattttatccaagtcattttagactgaatcacaatttaatctgtgtaatcctctggcttgagtctgggaggatagtgatttgttacaaggcaagcttctactgagaagtatttcttacatgaatacttcatagctaatttggctcacaagaaattctgccactacttcctgtctgcacaatgcaaccacatgttgtgttgtatttaacaggtattcatacctcttgtctctgtattgctattcagatcttcatgtcttgctcatgattttatacctttttccctcttaagtgctaacctcagtactgaccatattgaggaccctgcaaaaatatcaattgagctgaattaaactgaattaaactgaattgcctcactctgtttcttgtctgcattctaagggcagccttaccatcttttgcctacctaccatctggtaagtgcttcggcatatgcaatgtatgtgctcaagaagggcctccaaggcctagggttgctgtctggccaggcctccaaaaatctttgagatcttgggcactgacacttcttctggacttttctgtcctttagcagaaggcagacactgcagagatgactgacagtaaggaagctgaacagagaccaaaccaaaatatttataaatctagagagactgaaaaaataggactaatagctagaggtaagggttgaataattatggtgatgatgttataagtgatagttacaataatatctaatgtttttattgcttacagtgtactaagtggtagtataaacatattacctctactaagtcattaaatcctcaaaataattttgagttagaagtcatcctcaatttatagactgggaaatcaaggtacagagagtttaagttacttgccaaggtctacataacttatatgtagtagaacccaggctctctgggtccagatctccaacaaaaacactttcctgtaggttttactttatatcccagcataagatgttggtcatatttcttgagaagaagactagctggtattcccattctctgatccatgggctaaaagcattatcctccttggatgatggttcacaaggatcattgggaaatccattcttttaggctgcatacggttcttagacattatcatgactattctttcttcatctggggaaaaaaaatgtgactttctacactatcactgtgagaccacagtttggactatcttattgtttcataaggtaattaatagaattccaacaagaagaacagagccgttgtacatttctgacttcctgtgggagagaaaaccagaatcttagcatactatttctgaaaggaaaagttggaattggctgtcattgttgtcatcttgtcagttgtcttggatataaaagatggaaataggtcatgtagcccctaggaaagctgaatgcaagttgtgtccatagagcttggctatgaactgactgatctttgcatctcctaagatgctggtggtggtcccagggagttgggagcgaaggaaatcctgtactgttcagacttgagaaacaattgaaaggaccaaataatttcatcagcagagaacagagaaaccaatagagttaaatctggattattaattagtattatgtcaagcagaaatgagagggattttattaaaaattctcttaaatagtctgggcatggtggctcacgcctgtaatcccagtacttttggaggccgaagccggtggattacaaggtcaggagttcaagacaagcctgttcaacatggtgaaaccctgtctctactaaaaataaaaaaatatagctgggcgtggtggcaggcgcctgtaatcccagctactcaggaggctgaggcaggagaatcatttgaacctgggaggcggaggtcacagtgagccaagatcgcaccattgcactccagcatgggcgacagggtgagactccatctcaaaaaaaaaaaaaaattctcttaaatagagtctgttgaagttctgaattattaatacactgacccataaacataggccattaattaatttgatgccgatcgcctcatattcagagaagaatttcccaaaacatctccaacagtacctgaacacttgataaatgttctgcctccctttaaccttggccagctaattggtcttggggtgcctgagaccctttgaccaaataggctattgtatttcccatagtgattgaactgtaagttccagagtgttgatgatcttgtgacaacataagccttaataagcatcattagctgagtgatcgaaacttagagttgctttttttttttttgatggacaaagtgaggtagaatctcaggatgtccattaaagtttcacaagaatatgtggaattgaatttatgatttaatcctattctcttgtgtaaatacagtccttgatgagcaatgttgctccatatatgaatgaccctgaaggaaaactgccactgcctccccgtctcagtcacgtcttagcttgagctagcatttgtttaaaaaatttccactgggcgcagtggctcatgccagtaataccagcgctttgggaggctgaggcgggtggatcacgaggtcagttcaagaccagcctggctgagatggtgaaacaccctgtctctactaaaaacacacacacacaaaatattaactgggcatggtggcgggtgcctgttatcccagctactcaggaggctgaggcagagaattgcttgaactcaggaggcagaggttgcagtgagccaagatcacgccattgtactacagcctgggcgacagagcaagactccattaaaaaaaaaagaaaaaaaaaattccacttagttccctcagccttatatgagctcaggtggtagatagtggaatctcacctgagctattttaaaaaactaaattttggttttcttcttgttgagaaccaaatacatcagatctaaaatgtagagtgtcatgctgtctgcaagaatagccaagtctaggagaaaaagtcaacggattttgaatgaaattttagcgagcaacttctgggcacacatttcaaggacaaacttcactaagcacatcccttgcttgtggcctagcgaccaaatgtgaggcattcgagtattttgtttgatcatggatcttgaaaatgtctgaatccctttcctccctgcaactggccattctttggctataaaatgattttaaatcaacttgaaagtaaaaagaccagtttttatcatttgggtactgccagaggaatactgcttttctgagaagaaaaacacttgaaattacactgtttgtgatgagaaaacgtttctcattagaagtttccttgtgattgagtggagacaggacccatcttagcaaatgacttgtgctccaaaaactgatcaggatgctccaggttagattaggcaaaggtagtttccttattcattctacagctcaagagaggttattgtctttaactgacagagaaagggctggaggagggagaccctgatggcacagcagaggtgaaacatgttcatgtggagccaggtcaggactgagtccttgtgactgtacctgctgtcactcagtgatttagggcggaactaccccgagagcaaaaaagccgaaacttttctttcccttgtggaataatccagcttaagaacctgagtgtacatccctctgacgctttctgacagcttaccatcctcgaggggaaaactaaatcggatttagtccttgttctccttctgcaaatacatttcttctcggtaaactgggttgctgggccacaagctagcttgtaaaatgaggaacttggcaacagtgtctcttcttgtgtgggtccctatgtatccatccacctctctccctccctctttccctctcggcttccttcctttgctccttcattcactctccctccctctctctgatagaaatccacctctcccagagtttactttttcacttattgaaaacatagttttctgaatgcctactatacggctgggcactcttttagattctggtgacttaatgtcatacaaagaagaccgagtttctactctcatggaactgactttctagaactctctgaattttgctgaatcttggctcttccattgctagctttgtaactttggggtaaattatctagcctgtctgtgcctcattttcctcattaatagggataatattggtatttagctcaattggtcttttttttttcttcttcttttttgagacggagttttgctcttgttgcccaggctggaatgcaatggtgcgatctcggctcactgcaacctcagcctccctggttcaagcaattcccctgcctcagcctcccgagtagctgggattacaggcatgtgccaccacgccgggctaatatttttgtatttttagtagggacggggtttctccatgttggtcaggctggtcttgaactcctgacctcaggtgatccaccagcctcggcctcccaaagtgctgggattgcaggtgtgagccacagcgcctggtgctcaactggtcttttttaaagataaaatgaggtaacacaggtaagggctagtgcacagggcgtactgctatttttattgatgctgtttgtactatcatcacattcttcctctctgaggtgcttattgtttcatcattttcctggtgacctgagagaatgcttgcattgatgcctcattttcaggaccagggagaaagcaggagccttctcagaaaatgctcagggagcagcagttgtgaacatagcatgtacctgttcagtggaagtgcattatccaaacatgtcgtaatgtagtcattcagggtcctgccaggaaaaaggagaacccgctctttttatacttaaagaggggcatgagaaagaaaagatcaaagtgagcttaaggggctgggcgcagtggctcacacctgtaattccagcactttgggaggccgagacaggtggatcacttgaggtcaggagtttgagacagaaaagatcaaagtgaacttaaggggccgggcgcagtggctcacgcctgtaattccagcactttgggaggccgagacaggtggatcacttgaggtcaggagtttgagaccagcctggccaacatggtgaaaccccaactctattaaaataaaaaaattagccaggcatggtagcatgcacctgtaatcccagctactcggggggctgaggcaggagaatcgcttgaacccgggaggaggaggttgcagtgagccaagactgcgccactgcactccacccagcctgggcgacagagcaagactccgtctggaaaaaaaaaaaaaaaaaaagtgacactttgtcatttaaaggacactttgtaaatctgggttgagcatctctattctgaaaaatcccaaatctgaaactttttgagcactgacatgttgtcccatgtggaaagttccacacttgacctcatggcatgggttgcagtcaaaacttttttcatgtacgaaattatttaaaatactgtataaacttacctttaggctatatgcataaggtatatatgatgaataaataaattttgtttagacttgggtcccatccccaggttttctcattatgtatgtgcaaacattctaaaacctgaaaatatccaaaattctaaaaacatctggtctgaaacatttcagataagggatccacagcctgtgcatagatcctgtgtacagtggcaaagtcaggtctattgctttttcaaagaacggcacagcctctttcccttacatttgtgctgaacatcttgaaggaagtagaatcttctctgccttctgctagcccatttcccagtactttaaaactctttgatattgctgaatgagataaatcatttcagatattttttcagatataccaaattctatcttgccagtgcccctctgtcctgtgagccttgcaagtgaccttccttgtttctgacaaggaccatgatgaatcactagcttggggtatcttgtgtctcttcacactattgattttaggaaaatactttctgcagcttgcaaagccgtaatgtcatttgtctttagaacatcactgtccaaagaagaaacaatcaccatgctttacacatacattaaataaatgatacacttcttttttttttttttttttttttgagacggagtctcgctctgtggcccaggcgggagtgcagtggcgcaatctcggctcactgcaagctccgcctcccgggttcacgccattctcctgcctcagcctcccgagtagctgggactacaggcgcccgccatcacgcccggctaatatttttgtatttttttttttagtagagacggggtttcaccgtgttagccaggatggtctcgatctcctgacctcgtgatccgcccgcctcggcctcccaaagtgctgggattacaagcgtgagccaccgcgcccggcctaaataaatgatacacttcttaaaataaaaagtgtttaaaaatcttttttaacacagaagaaaagtaagtcctactttttccattactttgcttcttgataaaactctagatatagttaacttttaaaacaatacctttttatttattattgttattaaacattataacttattgtatagttaattcctatttttgtgaaccaatagtgttatacaaagaaatgtgtacttttttttcctaaccttagtttttgtttctaagctggtatttttcacaagtcaaacagtccactcaaaaaataatagacattggagactcagaagggtgggagggtggcagggctgacagatgagaaattacttaattggtacaacgtatgttatttgggtgatggaaaccctaaaagccctatatccatctaacaaaatgcaacttatacctcctaaatctataaacaatgtttaaaaaggaaataagaatgaaagaagaaaaagagttcattttgaactcaatggaaataatagaaaggaaaagattatttaaaaaaaaatacccctggctgagcgtagtggctcacgcttgcaattccaggactttgggaggctgaggcaggcagatcacaaggtcaggagttcaagaccagcctggccaatatggtgaaaccctgtctctactaaaaatacaaaaattagccaggtgtggtggcaggcacctgtcgtcccagctacttgggaggctgaggcaggagaatcatttgaacccggagggtggaggttgcagcgagccaagatcgcgccactggactccagcctgggcgacagagcgagactccatctcaaaacaaaaaacaaaacaaaaaaacagctgccccccaaaagaaacaaacaaacaaaaaaccccaaacagtccactcaatgctgaggtgacaactccatttttggtaatctgaatatgaatctttgacaagggtgtttttagagattattttgtttacaactgttgttttccttttattcacatgcacatttaccaccattaatacttttttttttcccaaaaaaaactttagccccttctctgttatagactaggtatttgacttggagcaggtaatttagcttctgaaggttttgttcttttcataagtagagtgaagagttgaacttcatgatctttacacctattggatctattaaaatctatttttcactggaattagagtatttgagatttgataataaaagtactaaggcttcctccaaaagcgaggcagaaatcagtttcattactatgggtaagtaattaaaaagacctcaacaatgaaatgcccttgacactaaaactaaactcatccaacttaattctcctgcggtgcctccgaagacattttgaaaagcttcaggcatggctgggaacactgtccttcatcaatgcggactcagtattagaccagagtctcctgggatttttttgttcttaattctctaactaaattccaatatcaacacgttttcttgtcatctgtttctatctcatcaagtacaggaccgaaagaacaaaataatgatattcaagtattctggttaccagaattcttgattaaggaacctttattttatgggttctataaatgagtgattaattaatgagtggttagattgtattcagattttttttttctggtgtaaaggcaagagaggatattgaagatattgatctatggatctgagtacactaaattggggtggagtaaatgacacctagttggggaccaaagaaactgctttatgctgactggggcttcaaggattccttataatgggattatgtaattataaattttatttcattaaaaaaattacccaacatctttttttcttttttctttttcttttttttttcgacagattcttttatactctaccacaagtatcagataatcactgagaacactttgtcagcttcttaccttgaagaaggtcattgttgatccatctctaaccgccccatattctatcttggtttgctttgccagatcatctgccgaatctatgggggattccattctctctactgtcaagaaggcagccagattggccgtgtaggatgaaatgatgattagggtgaaaaaccaccatatccctccaactattctggtcgatagagctttgggcatcagctctgatcctgtgatggtatcatcagagtaagggtgttaaacacagtcagaaggaaagggaagatgtacagttcgacactattctaggaagatcaacctgtaaaagacttaccgtcttgtaggtagatgaaataaatgcattttatagaaaatggagcaaaatcttaaggattattttcaaatcattaatcactactattgctttaactataatttatcagtagctgatggtattaaaacagttttaacctggaggcattccatgtctaaaatttagttagtttagttgcttagaattgaaaagtcaaccccaagactttttgccttttattactgtctaaatgcatcttatagtgtgaagtaaaatattctgcgtctttgtataactatgaaaatatttgaaatgctaacatttttatttaaggttaaagaatgagagctacttgtaaaatattaacatgccatttatcacatatactttaataaaacattgggattttacaaataaaataagatgcagccatacttgacagtggatgaattagtttttattgtcttatgttaccttaaaagctacaattcttttttctactgtagatttttatttggctaaaaaaacacattctctgcaacgcataattttgtacttcaataaaatgctgtttcttaactacacttcaaagacaggctgttccttaggtgaaagaagactttcctggtaagaatatacattttagatgtcattcagatgatttgaaattatgtttaaatgataaaatagaggcacttaatgtgttttccaaggaaaccttcctctctaaaagaaagggtttatgagctaagtttactgtcataaaagacaaacatcttgaaaacggtctagttcaattttgctcaaactcagcagcagaattagaataaatgagaagtacaattagagttcactccagttgtactgattcacaagtggattttggcttgttcatctgcctgaaatttgccattggttctgtacttagcatatcctccatgaacctgaaggcatgacagagtttatctgaccagataaaaagtgaaagaaaaacaccctaaattaaaaatcccgaagagtgaagtacagtaggtcagctgtctggtctataggatccctttactatactgatagggtgtgttgaagctctgtcgttaataatggcttaagatggaaaggaaaattggagttcaccagtctaccaataaatgaatttgtgctaaggtttaatctataaacagatgcaaatacggctcaggaaatcacagccagctcaaggccagtgataatcagatcaaggtcgccagagtttctgggctttgaattaacggatatattctcctaatgctattacgtatctttgtgttttattcccttttaatgagggaaatggtttgacagcgatttgtgtttccttctgtcgtttgtttgaatttgagtgggtaatattacacagacttataatagttttccattaaattgcctccaaggatttagtggaatggtttgctgctgttgttttaatattgtggtttaatgggatttatatgcctgtgggtgtgtgtgtgtttaatgcccaaggttgtttcatatctttgtacttaattgatctagcagtcttgtggcaatgtaatattattttagctctttagttggttatcattaaaataccatttatttcataaaatagccataggaaataaataacaattaatagatatatttttcttagcttatgggtgcagattttctgctgtaaatttattctttcattatttggttgcatatgaaaacataaggttttcacttatttgtatatttgtataattatgtattatatggcattaagagtggacagacaggtgaacaacaggctgttgacatgtaataatactaattcacatctttcacactttagaatgcatatttaaacttttggataaagttaccttagaaacttaataaaaatgttaatagaaacgtattgagattacattttaaacccttgttagatggcatcaattagacttctcaatgtttcttcatgttttctatttttatctaatttttgtgaattttgtaattctccatgttagttagaattatttagaaatggcttctttcaagtagagatgatttgtgtaagtttagtactctagaggatgaaattatacaaacattaaaagttgagtaaaacattactagaaaatatttgggatgagagacaatacttgctgaagtctctttagtgccttttacggcagacatgacagccaatcctgatccagactttgctcacgctctgtagaaaagagaaagtctgatcatcacatttaaaaaaaattcaacaaaatgttttccaattgagtacagtgacaagcttctgctaacaagagagagcaacagaggataactacctggttcaacgccacgtgctagagacagatgcactaacagtcacaagtacctcaagtttgtatctggaaagatttgttgcacctgacaaatgtttgtaaacttcttgaatgacaagcagagtctggttggggctgactgtcatgtacccaaggtagtggtaactaacagacactgcatcccacagtgtgctgtggatgatggtaaactccaaacaggtaaaagatgaaagataaattccgggggtgggtgcactcaatgacagaaggcagtcacagtcatatacctgcacaggccagctgcatgcatgctctgtgaaacctaaaagtatatatatgtgtgtgtgtatatatatatatatatgtgtgtatatatatgtatatatatgtatatatatgtgtatatatgtatatatgtgtatatatgtatatatgtatatatatatgtgtatatatatgtatatgtgtgtgtatatatatgtgtgtatatatacatatatacacatatacacacatatatatacatatatatatacacatacatatatatatatatgtatatattttctaatgtcagagaagacaagctatagggaaggagcaggggtctccttcactctgaaagtaattgctcacaagataaatatcctaaaaattaaatacatgggtaaagtagtatatggggtttcctgcaggatttatacctctgtgctatgctctaaatttatgcaaattacttctagtaaatcagatggcatctatacttatttagcagtgcccacacaaaccatacttaattgcgtaactaggattttcccactttcttcaactatttactatttcagtattataatttggtatttccacagtctctctctctctaatttgaagatccaaaagataaatatttcaagtgttatagcaattccctaatgagaaaccttagggttcacccccaagtagcaaacatgtttaatgtatatcccagtggaattttcctttgccaatgtattttgcagcttattgtcaaatgaacatatattccgaacacaacagtttctgtgacttatgattttcttatattagtgcatttaatcctggaaaaattttctataccatatgcctgacattgaagctgaaaaaaaaaatcacaaaagaaatggagttcttccaaaggttaaaatagctcccccttcccccactacaaaagcagaatccccgaattcataggaaatgtataaaatatattacatttctatggccaaattttatttccccaactcctacagtttattgttgctatggttaccaattgagggagattgtgaaaagttactgggaggctgaaatgaatctcagtagggtttgccagagtagtaattaggtggaagtcctaggtaaggttggcaattggaagaatctcagtgaatttaatctccaaaggatttagatcccgctcctttaaactgctgactcgtggagttatggctgagaaggagaagaccaacatctccatctatgcaaatttgtaaacgatttctaaggtaccttatcttttgctacccacaggaaaatttgtatttattgcttgatagaagtgctattttagatatatagcaagggagttccatataggtcattggttttgcttcatcttcaaaaccggctagaaagtccgttgctattttcttaagttcctgagatggtgtttcatcctaccctctagcttcatggtggagtttaccagcatgaaagcctgtcagcacactgtgggatgcgtgtgacaaagataggcaaccggtgtaccttgctgcatgagagctccaactccaaaccagaaactatttagtaaagtaaaattgttttccaccacgtctgagtcagggttgcatgggtgggggttataccactcgtagggtgtaaacctgtggtagttaacagaaacagtctgtaaatatcagagaaacacacaggacaccagcaaaaccaaaacctgctgagcaatgcagaaaacccaacaattaatcacaaaagcttcaaaccaaaagagtaaaggccatagtcataaacttacagctttggtgggcaaagtgcaaagagccttgagacgttaatatttaccagacttcttatttataggcaaattggtcagctggaattgtactcctcagctctatgtctactgaattcttctgagttttcattcatttccatattactgaacaactagatgaactgtaaagaaaggttcactcatcccaagtatttaccccaccaagtagcgacgaatgtgacacacacttgttgcatagtaactacaatgtcaagatattgtgtcgttaggtcctgtgggagacacaaaaaagaggggtgacttgccttcaaggggtttgtatggacagatggttagaaggagtctaagtggtggtctagcgattttgtaatgcatgaaagggattgcaaggctgaacaaattagtgaacaaaatgtagagctgaatttggagtgtattagatgtttttcgaatagtccacggggaaaaatcatgatcctaaaggaagagacaaggcatacatttggaattatactggtccaggcctagtggtacacattagtattaactacatagcatgcctcactgcagaatttcaaattcataatttccttttgatttgttttaaatttgttttcagaaccatggcctgtggtcacttaatcagcaaccctggttcggtaagtggtatgttttctatagcattattataggtctacctgcaaggtggtgcgctatgggcagtaaacgtttctggaaaaacaactagtatagtagtgtgggaagtcgactttgaaaaattcactcaacctctattgcctcaatttccttatttgtgaagaggagggaatccagatatctctgagggtgtacttaaaataaaaatctgtggaaccaaatatattttttgttctttctctatttttttaagcatctgtctgacctatgtagcccaaaggaggtctctgctctgtggttacttttgaggactatcttgccaagtggtacttatttttccaaaaagacattagcagaagctcaacgaagtgatctgcaaataatttaaaatgcagtaatttttagcactggaagattagccatttgccattgggtcttttcaatgcaagcaggagtgttagagtaatgttaaaaacaccataaagcccatgagaacacagagaatgctctccagccatacagtttcagcagtaaacaatggcgggttgctgacacactggggagaaccgggcttgaggtgaatacattatctatatgaaaagcagggcatgctgtgaatccagcacaaggaaatgagcagacaattcctcctcatgaaaaaccattttctaaacctccagacaccttccggaaagtgttcagtgcctcctcattgagtcttagggggactgggataacagtctcgtagtttatgccagcataatggaatccgactcattactgcagcttctccacagctgcagggtacaccatgcaggttcctatgaagctgatgaatatagctttaattgacaatgccatgccaacacattttaattaatgtttcaacaatataattaagttttgaatttgcacactcttatagccatagtagtttgctgagctgaagaaatgaataccaatattaatgaacctattaatggaaacagcatgcagagtaaagatcccgttacttaaacactatcattgtcacttgtacaataatttaaaaatattaattgaaataaattaagagcctaatgtattcaagagaaggggttttattttttcaaacagaccgtaagacttggcaaccaccagcccccttcaatattctgacatttctctcccagatatgctcccatcgatgagctcatcacttccctctttggaatgctgcttttaacttggtcttgtttcatactttgcacttataagagagcaattaatctaatttttgtgtggcaaaaagaaaaactgtctaaacagcaatgtgattctgcctgctctgcagagatattttaggtctttctctctgggattctgagtgatttgtggagcatgtggtctggtgaatattaaacagtgacatgatgctgtgctgtaagacactggctttttataaggcaatagacctacctgttgcctggatgtagacatttcagcttagaattcctaacacctgcttaaagatagccagtgtgacagcagtgtcagtattaggaagtctggtgaaaagattaatatatgacctacaccaaagataatccgaaactgctatccccaaatgactctcaagaaatcaatactcatctttactaatatgatagagaagggaagaaacatgcttaaaacctgtgacaaaacttgcatatagaagagtagccttatgttgaaatgtgaaagttcactttgggtttatgtttgtttctgcctggcttacacttgaagatataaaacaagctcacactgaagttttctaattaagggactaatttttgtggctgagaatgcacagtaggctgcattgaggagagaaaaatccattcatctttcaagggagaatgctctattgaacttgtaatataatggtggggtttgtattgtaaccatagaatttactttcaagggttttctagatttttttttgccaaatgccaactttaaaaatgtccatttttaagaagacgaacataaatgataaaatgtaagcagacattctatctggatatttgatctatttaaattgtttatgatggacataatttattgaagttaaatatttttcaaaaagtggaaacattgtcaaccacaaaacaaaaaccctgacatacacacttaattaaaagtcatagtaattaaatattgttttccttagtttgtcccaccgatgtctacatctttataaatttaattcagttcaacaaataatttttaggcatctatctagtgaaggcatttgcttaaatgcagtgatggggctttatttttcccctttaaaagaacataagagaatacaattcacaacataaattccaaagtctctctagagctatagataattatgaaatttactgtttttcatgtccacttccctaacttggaatgcaaaccactaaggtggtaactgagggtacagagtgacggagttcatggtctcaaactatgatggtaggaagtaaaggtgacttggtacatctactcaaccagaattttgtttttgggaatcaagtctaaatatatatttagtggctttatgaagcagaagcagggatggattctaaggtgtagagaaggtaaatgtagttgaaagtagaatcttcatgacagtacacttgtgccctggagggagttattttctgtatttcgtcactatactgtttccaagtttgcactggatgtataacacctccacgtgtgaaccaagacaagggcaagaaggcagtggaagaggagacaagaagaataagctaaataagggaggactggcttataaatgatactctcggtgagtagaactactgaatggattgcattgatggtggtagtgggggtactgttatcttaatagaaataaactgaatgaagtccaaaaatatggaggtctgggtcaccaagagcttatggaagaatagacaaagaggggaaaactattgaatggcgtgccattctgacatactctgatgacatacataaggagatttaagcgcacagttggagttaagtgtaaagggtactttcagcctgtgtgcttgtgagaacttttggatgctgctggcgtttcttctcctactggctttggtcaagtcatgtaataaacaatgtatttgctcatcaacctcaccttgcctgttctactcatcaacatcactgcctagacagagcctcagactgcaaaatatggaaactcacttttgccctgcgaaatatggaaactactgttgccctgggctgcatgaattgctccatcagtcctagtatcacccaacaggtgtgggcctccgggcagaggtatgcaacaagtaaacacaagattacttattagaaggtgcttcaccttaggatagtcatttattaaatgaccattccgaggcaatattaacttcactgaggagtcactaatgaaaaatacctccaaaggtaaacaatttatttttaaaaattttatacccaaagcaatatcttctttaattgtttcgagcatggtttctcaaccttggtgctattgacattttggagtgaataattcttttggggggtacctgtcctgtacaccataagatgtttggcagcatccctggactccgtccacttgataccaatagcactccctactaccggccatgacaactaaaaaaatgtttgtagacatttccaaatgttccctgggggacaaaatccctcctggttgagaaccactgatttagagtattaaaatacaaaggataatatcactatatacatactgtcaatattttattttctgaagtaaggcatatttaaagagagctttggtcagtaaaagtataaaatctgagctttggtaagggtacagtttataaggcctagagaacatcaaaacattcatttcatattgaatgtataaatacccacatgtgagagcacatgttgattcagtttgagtatgtctgccttgtggatctttaaaacctttccagcctgtgttattttcccaagctttctttataattacaccagggaaagagttacctggcattaatcaaaaccagacagtggacaatgacaaagagctagcatgaagaaatatttctcttagaaattcctggagggaaaacaaaaattgattagggaaaaagttcactgagttttgttgaaaggtgaaaaagattgaaaacaagtagggacatacaaaagcaattattttttacatggtttatctagggacagcaaatgtttaagccaacagaaagataaaataactgtttcaaatttagcatcaaaagtattcagaatatatgatctattgaaaggtataaaaatcctttaaggaactgtgtagagcaaaatggttaaatacagagttaaatctcgaaaagtaaaacctcaattgaatcatcttaatgatagcacaaaggtttcatgcctccaggctctgtatgtaagcaatctttcctttcagcattatttctagaattctctttaactttctcatgcctttaaaaataaatttaatagaacttttaaagtatttttcttcattcctaagggtttcacaatctttttactccactgttttttatttgctatgataattctttgctgacttttttatgttttgcttatccaaatattctaggggtcaaatatcttgagaccattttacaattcctatggaaacattttacacatcatttgagccattacttttgttataaatcaaggaaaatggctaaataaccattttatgttgcttgaaatagggataaagttaaactaatattaaaaattatcttcctctcttttaaaagtaactttataaataattagaaaacattcatttacagaacggcttttatatggaaaccttccaagaatagaacactaggcaaaactaaaagtacactttaaagttcctaatttttgtctgcctctgggacatacagaaatctgagactgacctacacctcttgtgaattcagtgattctcaaacttaccttgcaatcacaaagagtacacagctgactcccaagcaggctaagagcacatacatccaaatatctggagacagggggttgaggaaggagaaaacgcctggattggtaccattgggcttccggtagagaatgctgatgcctagggtcatgaagggtttggagaagtcaatgactttctcccgcacgtaggtgatggtaagaggagccactgccaggtcagccctctgcaaaagcaagtccaaaattgtcagcttagtctagtttctttgcaaatgtctagacttttcctgggtactcctgattcttattctcaactctaaatgcttctcattcatgaagctcctgtgatggttggttctaataaaaaaaagccaatttatacagttatgtttatgaaacagtatcagcaaagagaaaccagaaagtataaaacacacatatacatacacaaatatatatccatcattctggaactaaagacaaaaatgcaggaagatgcctttaaaaagggcatgtgagaaaaagaaggaatgagcaacttggttgtactattaattgacatgatgagattttgctctgagctgaaaactttaaaattcttttttttttttttttttttttttttgtgaggcggagtctcactctgtcgcccaggctagagtgcagtggtgcaatctcggctcactgcaagatccacctcccaggttcatgccattctcctgcctcagcctaccgagtagctgggactacaggcgcccaccaccacgcctggctaattttttgtatttttagtagaggcggggtttcactgtgttaaccaggatggtctcgatctcctgaccttgtgatccgcctgcctcagactcccaaagtgtaaaattcttaatttaagaatcactcaagtttatgttcagtatgaaagaaggatccatataatatggtttggttctgtgtccccacctaaatctcaccttgaattgtaataatccccatgtgtcaagggtgggaccaggtggaagtaactggatcatggggtattgggatctggtgattatgagtgagtctcatgagagctgatgattttataagtgtctagcatctcccctgctttcacgcattctctcacctgccaccctgtgatgaagtgtcttctgccatgattgtaagtttcctgaggcctctccagccatgaggaactgtgtcaattaaatctctcctttataaatttcccagtctcaggaagttctttatagcagtgtaaaaacaaactaatgcaccatatatttttatcattaatttttatctttacttgcccttctaagtaagcaaactccatttccaggctgttttactttgcttcttaaaaaaattgttacgattcaaaaaaaggaaacatttcttctgacatcattttttcctctcttactttctcttatgcatattttcagatatgttagaaatattgttacttacgtgatctatgagttctttaaccatcccgttccactcccctttgtcattctgggccccatatttgccatcgggaactagtttaacatcataaatgaaacccaggatgtttgacaattctttcaacaggtctaggcaatatccttcaaatctgtcatttccatatagaggcttatcagatttcctgtacataacatagggttcttcctaaatgaaacaaaccaaatatgaaaaccctgttataatgaaaggaagagtttaccctatcagcagcttgaagatgtgaaatgtttgataatgattttgaagagctgagagtactgaagtcattcactcatctgcctgcctatgtcctctataaatacaaaacacttcctatattattgtttctttcccttctgcgtctttcgatgggagcttttccttccgctgtggagggtggggctgtgcgggaatggtgtgatggatacacagtcactgttaaatgttgggtctgagaagaaggaaggcgcaaagggaaatgggggcccacatgcctggccacctgctgtgccaatacctaagcttttttttgtatgacccttctggctttttttttttttttctgacggaatctcactctgtcacccagcctggagtgcagtggggagatctcagctcactgcaagctccacctcccgggttcaagcctttctcctttctcagcttcttgagcagctgggactacaggcgcctgccaccacgcctgactatttttttgtatttttttttagtagagacggggtttcaccatgttggtccaggatggtctcgatctcctgacctcgtgatccaccctcacacctcacaaagtgctgggactaccggtgtgagccaccaagcccggacctggcttttatctaagaacctcatgacagagaaatctacatcaccaactatttcctttcattctttgcatttcctatctatgactattctcatttctttatctaaatttcatctgaatttcactattcacttatgatttatatattttgattggtttccttcagggtagcctattccaaaggccatttctatttcttcttttatcatctttcccattttcttttttgaaatcacctcaaatctcacatctggtcattctctgcttatatacgtgcatcatcagtcccctctcctataaataatggacacttccctactaccatgcatctataaccttgttaattctcatttgactaaatgaatcctcatttggttttataaaatataatagttgctatactacagacatattctttatatttaggtttatcctcaaactgataatggggtcattcaaacacagtagagaaccctgtgttttcataagacagtcatagagaaagtagtaaccagaagagcaaaccagtttttcctttggatgaacaattctcacaagttaataatatcaacaataaattgatttgacattatggactggtgtaaggcaggatgtctgcaagcaaggatttcagggaaggctactcctgcccaactccctggagaaaggaaaaagcggaaaataagcaaccggtagctgtacagtggctggatggggcatgaccagggcactaataggaggcaggactttcaagaacagttagtaaaggagctgtgtacagaagtgtgagcagagcaaagggagccaagggaggtgggggtctgatttggtggcaagtcatagacacacaggcaacagcctcttcaggaaacctgcaccacccagggctgaggcaggagggaggaaagaatactcctgaagctcagtgcagctggaccctaaaaacagtgccactgatgggcagaagctatggttgtagaaagtcagaggttctgaaaaaactactagtagcagttgggagggaacagaagagcttctcttgcctctcttcccccacctcttcccccacttccctagtctcttgctagggtctccacatggttgaaaccaactagcagccagagagcaagggagaccagctgggaggggacagagagtggggctgagcaggactggcaatggattagaggtgggagatcttcagaacaacgttggaagcgtctaattcaatcttcctgtaagtatgtacaaacacaggcttttagtgtcctagttaaaaatagacatttgcagacagaagcgttggcatgaaaaagacagttgaggaatgcttcgaagtctaaggcaggagcctggataagacaccctcaattccatgaagtcaacttaccagaatggtggtgacaatgagtgttctgttggccaatgaatcagtgatattgctggacttgtctttgttgctgtccgtcatgttaagcccactgttggaattccaaatcccaatctacacagaacacagtacatcagaggctgctggctgtcagtgtggcatttacaccaaagagaggccccttctctaccaggaatgggcacaaaagctcacagtttgggacactggggcatcacagtggaagctactaaacgtggggaaatgaaacaacagaggaatgaatgtgtagacaaaataggatatatctgtgctattgggggcagggtaggtggaggtctttttctttttcatttagtaaactcattttcttttataaatgaaaaaatatataagaattcttaaatgaatatcagatttttcttcctatatatatatttgctgagcatctatttatgtgccaggcactgctctaggcatctgaggacataacaatgaataaaatatacaagagtttcttcccttgtggagcttacattctactgatagaaaccttaggctgccaaagtagtatcactagtttatttaaaatttatgaataatggggtgaaggggcagggtgaatggtggagagacccagcatctaaaagggaaagatagtggggtgccgagactcatgcctgtaatcccagtgctttggaaggccaaggtgggaggatctcttgagaccaggtgttcaaggccagcctgggcaacagagtgagacccgatctatacaaaaaattaaaaaaaattagccaggcatgatggtgcacgcctgcagtctcagctactcaggaggttgagatgggaggatggcttgggttcaggaagtcaagattgcagtgagccgtgattgcaccactgcacttcagcctgggtgacagagcgagacactgaaaaaataaagtaattttttctttaaaaagagaaagataaatgaaagaaaacatgtcatgtgcatgagaagtagactaaattcagggcctatcttctttgaggagccaaagctgggcaaagagtgcttgtgagccctagcaggactctgttcatatctctgtcacagcagctagcgtcttctgttattatttatctgtttacctgtcttgtctgtccacttgatcgtgaactccttcagtgaggatgctcacttttactggtcactgattttactgtcacaaaaccaaccatggcaactggcattcagtaaagcccattactctttttaaaaataatgatccacaattttctccagtggccaagtcactcctgggttgtgaggtggtgtagaagtgtattgattcattcagcctctgtgggaacccagaagaggagccttggggattttgagctattttgtaaatgcctatctttctgtaggcatttactgccagcctcacatggtggcttgcaagtatgttttagagccaggaagaccttgttgctgtgtgtccttgaatgagattctaaactttctgagcttcagttgattctttacctataaagtatttcacaggaataatgagaagatcaaataatcagatgatgtatgtggaagtgttggtgcatgttgttaagacctgcacacatagtaacaagaaaggacattgaaatggctgcctcagtcatttcttcaaccttaccctgtcatgaaggaatctggactcatttttttaaaaattcagattctgataaggtaaaagagctatgacaagtggcagtttaggaacatgaacacttggacccgctctgagatggacagggtggagctatgcttggtccctaaatatgttcctctaatgggaagacagacaggagtgttaggctccatcctcctttgcttttctatttcttgactctgatttattgcctatatttagcagctggaaattcatttagcttgacaaatatcccttttagagacatcaatgctttgaaaaagtttcaaggactattacacgttcacacatcagtgtgaactattttaatttcagttttatttcctatacttaatgagggttagttgactggagaaataaagagacaggtataggtaaatgggggaatgggatagtttttgcatttgaaaatattgtggtcctgcctgaaaagaagtgtctattgggttgtaagctgtactcttaataaccatccaacgtttccaggatctagtgtgataaatatcacctagaatgcacattatacgtctaatggttgaagaatctttaggtttcttaatctggctttagactcaggaaaagtggacagcattttcttctttttcttctcaatctccatcccttcttctgaggcagggacccttgcttctaggaaatgtaactctggctaaatatacctgtctattgattttcatccaaggctgtgctttaggttgtgaacaattgactcctagctccatgaagagtgtgtgtaaattgggccctgactgtacttctaattaaaccttcacttagacactgaggagaagggaatctaatttttaattaagtaagtattgaagggtggagaaaataactgtttttagccacttgattaagtgataggatgtggtctctttaaatcttatttctattaatgtcaagtatgtgagtgttggaggaactaccgtaatatttgaaactgacagtgttcaatagcctagcaatatcactctcttgtaaaataaaacttgaacttgtagacaaatacaccccacagcttgatgtctggtttttctttcctttgctatctgcactaaaagtgcagaagctaagagatcattgctgctgccaatccaatcaactaagtcccaagtcctattcagtttaaactttccttcttaaaatgagaaaagggtgaccattttttcccctattgtctctacagagggacctacagaaggtcctttaaatgtagactagaagagtatcaaaatatagtaaaggtcaggctattcctgggaaatgtacagtatatatatgctgagtgacctcagtcttctgtttccaaacctgtaatcagcaaaacagaactgtgtatgtgtgtgtgtgtgtgtgtgtatgtgcacgcatgtgtgtacctgtgtcttttaaacccaagtagtcatgtggctttatctgttacttgaagtaaatgaatatgttctcaggaaatgaatgtctccctttaaagaagtcagatctcatgattcatgtgtgctggagacagaggtacagttaagaagatgcctggacatttgacatttcagtactgttctacgaactaggaggagtgcctccagggagcggaacctcagttttcaagcttcacagtgaaagcagacagtagtcatttaccagtgagaagtagtggagggtggatcagttacttgtggggaggagcactcaatatctaaattacctggccctgatttctttcactttgtaagctggcacaagggagcagccatgtgttatctaggacaactgagaaaagcatttgaaaatgagtgcccaaatgacattaagcaaactttttttaaaaagcgatgcaataaaaagggtattcagagagccactagtatctatcttctaaacctagacagtgattcatgtaaactcaacatctaaagtggctgagggaaataatcaggtatctagggcaaagataaaggtatatgtgtttcctgtattacgaaccttatataacaaatattttagtgagggatgttgtaaagattgctaccttcctcttttggaaagaattttgggtgaataatactattctaaaataagtcagagtacgaggaaagcttttgggatttcaatatgatgaaggtgaatttttgtttaagttggagacttctggaaaaagtgcaatgtgtttgttgggtctgagtgggtcgcctgtgctagaactcaggttaccgtgaatttttgacggagttataacacaaaacagcacaccacagtatatacaacttacaatgtggaacatgatgggctaccaggagggaagaggcatgaaggcatggaggatcaagatcagaaagttacaaccctcgggagtgtgtgtggctcttgcagtttagtgacaaatagaggacatcccccctcccctttatataatttcaaagcttggattccattccctgggacatttgtattagattaattcaaagtgcccagagtctcaagatggattagtgtaataggtttttttttttttttttctttttctgggtgccggttaggttcatctatttaccagtaaaattttagtgaggaaaccagatcgccttctacatgcacttagtagccttgttcactgaagattaaaacaaggcttttaaacctatgctttgaaaacttaaaaagaaaaaatttttgaattcatcactgagtactactaagagggggacaaggtttttggctacagggagaaacttgtgtacactttctgtgacatagctgataatttgaaagatgaaagtgaacctgacaaaactgttcaagttgaacaacctgaagcaatttaaggtccattcatcagtccatagattttttttaccaagtagttttagagagagagagacagagagggaaggaaggagaggaggaagagaaagagagagaagagatgaaagaaaatgtttgcttaccacggggacatttctctgatccaaatgtttttaatgtctcatatttgcttacataaatctatgcacattcattggcaacatggcactgtataataaactataaaatagtgggtgttataattcacaagataatctcatttcctttccaaggtccctaacgtttgtgtcctctttagaactgtggctctaaaacaaattgcaagacagtatactctgatgaagatatcacacaaaacaaaagatagctcatgagaaaaggaaatttctgaaaatggttcatattttgtggtggtgacattacaggaggtgtcctagccttctgaggctgtagcctatctgactagtctcatggatcaaatctattgtgatttttatcccccttaaggaaaatatttagtgatttgagaaggaatataaataggtcagtgtctccttctgttacagttgcctgctttcaatcctaacaaggactgatcctgcctgggagaaacaaaaataatcttgggggaaatatttaatccataattatttaatccactgcaaacctgttttcaattcacaggtgatgttgttgagagagataacatattcaatcactcctctctctttacatggaacttcccttctaaactgcaattggagagctacaggtctggtaacattggaagggcacaggcctttccaatgacattccccatcccacccccaggtttcctgcagttgttgtcagagtacaaaccttcttccacactttatacaagtgtttagacacttcgccagcagccttggttttcagagagaaaaataaaataaaaacagcacttaattaaaatggagcgtgaaacccagaaggaatcatggtgtgtgagtgcttagagtgttacagttcccacccattgtttggaatttgcatcttaattcaatataaagcctgacaataggtacagcaaagagacgaatcaagacttgggtctcacagaagttacctggtggtaagactcaatttttacttttcctttcacacaccaagaaatgccttaaagtgcttttcaatgtatacaggtatgctgcagtattaagggtcttcattgttccttaagaagacccttttaaggcattggtaactaaaatcaatcaattaaccaaccaaccagcaaatcaatcaatacacacacacacacacaaacacacacacacacagacacacacatataaagaagaagtatgcttgatgacttgttctttgattatgggtttctgggcagtagaaatttgagtgaaagtgagaatgggatttttctaataattttccctattgactccaagagaggctgacataaaaagattgggcatttcctccctcggctcctgagagagatgtgttggcttccctcattgccttaaggcccaatcagccttctcaggaattgagcccaagacacctgaagaaagaaaagttattgcaaacaatgaagagataagaaaccaacacaaaacactttcatctaatttgattttgcctttgatggaaaaacaccaatgcaatgtgcataatattacggtgtatagatagctgtgaaagcataacaatagctccatctatttcatcattcacctagccaaaaagatgtttccttaacagcttttcttcccccttcagtgctatacataagaggagaacagagttggggaaagactcatgcttcgagaagcagacattttcttaaaaaaattataggcttttagatcataacaagtattttttttcttttgttccctccagccaacatcccatgcaccatcgtggagactggctggatgccctgtgctctatcagggcatgtcagaccaacagaggggcaaatcagagtgaagaggaagccagaagatgggagagacatttttgaagtgagtaacctgcatgtataatgtgtactctcaaaactgcaaacaaattattttcctcaaatatttcacactggtggtcaccttctaatacattcagcctaaatgatctttgtttccattaatgtttttttgagggggaggggtagttagcacctgcaaaaaaaatgtgtcctggttaacaaaagcaagaaaacggaaatgaaaaccttacctcattttaaaaaatcaacccaactaatctaattaatcaagcaatcgattgttcccaaagccactcttacattaagcacactgtcttattcactatagtgggaaaaaaaatgtcagattatagagttttctgttgaggtgattgctttgggggtttcaattgtttttctataagattgtcagtgcaaaatcttcaaactgtaagtgttaattctgacgtatagtcatgaatattaaaattggcatagtaaaatatattgaggagccaaattcttttatcattattatttaaccaaatagtttacattggaattactctaaataataactaaagtagaactttaaacatggagagattcagaattacaactaaaataatcctaaaatgagaacccaacattaaaatacagttttttggcatttgtcctaaaattaagaatgcaaagttaatttgctccagtaagtctcttctatcctactttattctgtctgtcaccaatctcaaaatggaataaaatgtgcaattaaaattaatttctgggtaacccttggatgccattccatcgataaaccattgatagcttctgcttttccaagtctaaactcaatttgttaaaagctttaagacatgggcctaatgacacccaactctagggttatatatgtaataatataatcacacttgctatgtaaatgaagcacaatagaaacactagttagtactgctattactaagacatgaaatttaagaatctagcacatcaacttctatctgcagaaaaaagaaagagagataaaaaactggatgtaaaagaacatgcttagagaatcacttcatcattcacctacttgtctttgcaatttagtaaaaatgcctgaacaatgttcatttgttattttatttatttattgttaaggaggttaccttttcagttccttcctctttgagactaataatgtccagatcaaaatccttcctcaagccattggttttattaaaggtgatatgcccagtcaagccatcccaccgggcctgtggacaagaagaaatgtggctgttattgttaaacatttatcataattcctgagaccatcaaaattataatacctcaaattcatcacagtatccaattatttgttttcatcatgctgttataaaccattgcattggttcagcgacaagatagcagaacacatcgtctttttattagcactcatttattctgtcaattctaacatcctaacccagtcaaacctgtcatcgtggctacctaaatggacagtatggaaagaattgccgtaaaacagtctgcacacggaatacacaaaatctgagaaatcacaatattctgttttccaaggtcaatccaaattccctttgagatatggctgagtggaagtgagtccctgctttttctttctctgtgaaaagaatatagactaatatagtccaatgatgtattgcagtttttaggctgtttatgacttagcgtgtttgcaccatttgggcattataatttcccgtggctgctgtagcaagtaatcacaaacgtgggtgctcaaaacaacagaaatttattttctcaaggttatggaggcctgaaatccaaaatcagtgttaactgggtggaattaatgtgtcagcgggaccgtgctctctctggaggctcgagggaagaccctattctttgcctccttctgcttctggtggcttctggcatttctccttctcttgtggttgcatcactccaatctctgcctcagtggtcacatttcctcctcccctgctgtctgcataaaagctccctctgcaaggtggaggttgtggtgagccgagatccttccactgcgctccaggagcctgggcaacagagcaagactctgtcacaaacaaacaaacaaacaaacaaaaagggtcgggcgcagtggcttgcgcctgtaatcccagcacttcgggatgccgaggtgggcggagatcgagaccatcctggctaacacggtgaaaccccatctctactaaaaatacaaaatattagccaggcgtggtggcgcatgcttgtaatcccagctactcgggaggctgagtcaggagaatcgcttgaaccccagaggcagaggttgcagtgagccgagattatgccattgcactccagcctggcgacagagcaagactccgtctaaaacaaaaacaaaaacaaaaaaactccttctgcttctgtcttataaagacacttgtgattgtaaatacaatctaaatagaactcacctggataatttccccatctcaaaaatccttaatcacctatgcaaaggcctttttgctatataaattaacatttacaggttccagggatgaggacatgggtaacttttgagggtgccggtcttcttcctaccctacatatcaacatcatttcaaataacaaaaaattcacaatagtctgcctttcacagaactcacattgggtatctctggtggttttattaaataaaaagcggtggcccttgggagagtcttcagcttcaatcattaggtgatttttggcaaccttgttgatttgagtttcacttacaaatagggataaaggaaaactcagatctttgtatccacttagctgtttttctccctcttgactttaccaaattcattagacatgcataaaatgggaagattctgaagaattacactgtatttgcagttatttgcgccacgtatatatgttgaatgtatttacccatttggccaagaggcagagcaatgcagtgaattttccatacctctagggctgaatatctgcagtgtaacttcaggcaagctactgaacttgaggcgttttaatttttaacatttattgtttttataactgtctctcacttttcccactttcataattctagagtttggctattactatctcacgtttagcctttacttggctgtgctgtatttcattttacaaatcacgaccagattcacggtccccaagtaaattttcgtatttatgcaattttcaccagcacataaagtacataatggattcattctacctacaaattagtctaaaccttgactttacgttggaggttgtgatggttaattttgtgtgtcaacttgcctaggccacacgatgcccaaatatctagtcaaacattatttctgggtgtgtctgtgagggtgtttccaaaaaagattagcatttgaaatggtggactgagcaaggcagacagccctctccacgtgagtgggtaccattcaattcatgtagagcctgaaaagaacaaaaaggcagaggaagagagcatttactctctgcctgactgacagctgaaacagcggccttcacctgttcttgagaacaggagattacatcatcgatgctcttcgttctcaggcctttagactcagactagacttacaccagccagctttccagggtctctagtttgcagatggtagaatgtgggacttctcagcctccatgttggtgtgccaatttctcatagtaaacctctttgtatatatatcctattgttctgtttctctggagaattctggataatacagaggtctttgaaaattttgcctaagctacgtctccagaatttcctaccaccgctcccctatgcacagccccagctggaacaggcctgggctctccagcctctgtgctattcatcccagcctgcagcctccactcagcctctccatctcctatccagccttcaagattggcttattgtgctattttggtccacagtcactattctcctctttgaggcacaggcctcccagcttatacacccctctgaccagtattgcttgtgttttcacatgtgattttgtacttattaccacttacctttacactttcagtttggaaatccttatatcctcaattggattggaagcttgtcagtcaaacctaattatcttactaaattgtgttctctttagtatttaacaaaatggcatagcccttaggcactttaatttttttctcgctctaatttgttccaaaacaaaattttattaatttgtgtttttacttttctgtcttctgtcactcgtttctctcttttaacccataatttctcaactcataattccatctaaaaatagcgaaatatctttgattgggagtcaagaaaccaaatttagtctttaagccactatcaagttttgcggccttggttgagtcattttgtcccttttttaggccacagagaaatgcacagtaagtgaagattttgcataaaacgagctttagctctggaattctacaatcataggcaagataccatagaggggtttaatgaaagtgattcatgaagcacctatgatctggaagctgggctatataaaacataaaacacagttgttatactcaaatttcaatgtaaaacatattactatctggctggggagaaaagactacagaatttggttcaattatgttttcactattaattcatttggaaaatatccatttattgaatatcttctctgtgcagggaagtatgctgagaatacagcccctagaagtttacagtttagtaggaacaaacacattaacggatttccataaagcactttaggtttgaggataaagatttgcatagaatattgaggagagaagtatggagaagaagcacttatcccaactgcagggaaagagtcagcaaaagattcctgaaggcaagaatgcctgagctcacaaaggataagtccaccaagcaaagattcatgtgctgggtaaaaacatgaaataaagaataaattataagtttgccatgagacactaatgcaaagtaagaaatgatgcgaaatgagcctaggaaggcaagtagtctgtttataaaggcgttatgaagcatgctagtttgcttagacattgctcagtagacttttggggaatcatgggggtgttttaaacatgtgttgccatggtcagatgtgcattatagggagatcatttgatatctcttttataattgaggagaatgacttggagaaggtcaatattgtaagcagtgtgttggttagtgggtagttctcatagaacaaaatgtatacagtcatattcatatgcccaaatatgaacacagggatagcacaattcctccatttccctgtcccaccaactggcacacctttaaatattaatgaaaatagttccacagcaggatagacagaatttcataaagagtatgttaagaaatcagcttaaatgtaaggaaccagtataattggccaaagcatattttctggctaccattcagatagagtggatattatgacaaaaggatactttaccactgatagtgctggaagttaaatcaatggtagggaatgatatgtggacaagaaaaggctccaactttttcctctaagctgtctcgatggcaaactagatgttgcccaagtactgtaacacataaaaagaaatacttcttcagatcctagtacctagtctctagagtttattgccaagggagaccataataccaaacactggcactagctttaaaattgaatggcatatctttatggtcagtagtaacacctattgccacaccggctgagatccaggtaatcatgtctctgcaatgggacaaaaactatcagcaatgaatacaagtaggaggtgtcctcttgtgtctatttaggtacacctcttggcattgcattctcctttttctccccgtcacacctcaattctagtttttgtactctggtcattctttcttattttgcaagccaaaggctggctttgtggattgatgggttaaacgagagccatgaaataagctgctgtgttaggcttacaatatctgtctgagagctgagaacaatttgtgtaatgctttggttgagtggaaatctccactgtgttaggggtttgaattaagtcagttttcaggccccttcttcatgcctctaaacaaggtactgttccaactgtcctcctgacctgtttgaaaggatgtagttatcttcattaaattctataggattttcagaaaggttttttctagaggcaacttttcctttatggggttcatgttgtgagtcaatttggtacattgtccagaatttacaggggtctctgaaaatgtacagaattggtagcatttatctcttaggggagcatatggcttatagcggggtcttaaaacccagatcagaaatccaatttcattccctaagtgtgactattgtgtccgtttgtttggattctcttgcattgattttattcttgaacttagtgttccaatcacggctgcagagtaattcccacttctcgctttttctcctgctcatccaagtggcaaaaaagttcccttttcatgttttaacaatgcttccttctctgcctcaaatatctacatagactccctgtgtggttcttcactgaaaggaaatatctttgaccttcaacgtcaaatttcccttactggcacaattacccatgtcttcctgcctctcatcccctagattagctgcatttctgtatatgttctttgtttttctgcaaactcattgttgataagcatttattaatcatcaatacactattgattagggtgaatatgcaatgactaattcctggatgtgataaataggatccatgaggaatccatttttctgggacagggctgaagcatatacaatttagataatgatatataattatattatccataattaccatgtgcttgccttatgtagaagcatttgcagaggggacaattatagtatacttaaaacagaaaacaatacttaaactattgtccctattttaggaaagagctttattttctaccctgcatcagatcttcatgtctaccactgcttaatagcaactaaatcaaatattgtgagttttcctcattcctcttattggacacattatctgataatcaagagacaggaatcaagaggtaaaagaagaaaaataaaaggtttcatgaatatcttatttgtatattctttctcaagatatttattgtccaaattaaatgcacatattttattattagggaagtaaggggctagcacctaactctgggctcttatgataatcaactcttaatgtcattagttaaaatgatttcttttacttatttattttttctgaaagggaatttttttttcttcaacttttgtgttaagatcaggggtacatgtgcggatatgcaggtttgttacacaggtaaacgtgtgccatggtgttttgcttcacagatcatcccatcgcctaagtattaagcccagcatccattagctgttcttcctgatgctctccctcccctgtccgcatctctgacaggccctagtgtgttttgttcccctccatgtgtccatgtattctcatcattcaactcccacttataagtgagcacatgcggtgtttgggtttctgttcctgcatgagtttgctgaggataacagcttccaactccatccatgtccctgcaaaggacatgatcttgttcctttttatggctgcgtagtattccatggtgtatatataccacattttcttttttcagtctatcattgatgggcaattgggttggttccatgtctttgctattgtgaatcatgctgcaatgaacataagtgtgcatgtatctttataatagaatgatttataatcctttgggtatatgcccagtgatgggattgctgggtcaaaaggtatttctgtgtttaggtctttgaggaattgccatagtgttttccacaatggatgaactaatttacactcccaccaacagtgtgaaagcatccctttttctcggcaacctcgccagcatctgttgaaaaggaatttaaatatgtaaaagaatgtaaatcctcccttcctagaattttccttgacatagccattgtcctttgccatactgaataaattgtttcctattgagagagacttcttattcttcacttatatattggaaactatgttttcttctgagaacattgtgtatggaaggctcatggcaaactcaaggttaactttccttgctagatcaaggtgaagaaaaaaattgtttttaagtgactattctattttttaataaaacttataaaaacttgaaaatgaagcaaaaaaaaaaaaaaaagattgtgtgaccttctttgtcatggtggccatagtacaatagcctcatccaagggtgatttgattctctaaagaggtgtctctttatttttaaatttactgttgtttaagatgcagattctgtgaaattacatgttaatttataggatttgtatgtggcagagatgtaaatgatttccatctaatagaaaagataacctgaaaaattataattgtattgacctatcggacattggccagctttttattttattttattttattttaagttctggggtgcatgcgcaggatatgccggttttttacacaggtaaacgtgtggtggtttgccacacatatccacccatcagctaggtgttaagccccacatgcatcagctatttatcctgatgctttgacttccctggtggcctctagaaccaccgtgcctctccgtctttttacagcaagctttatcatcctgctggttccctcagttagacacatcttcaatacttgctttcttatgtttgtgctagagtcacatatataactggcttaaaattggaaatggtcctacgatggtgcccaagtacactcacctgccagagccaatgttatgggccatttaagctcagaaacatctttttttaaaaacaaaacaaaacaaaacaaaacaaaacaaaaaaaacaaaaaaacccaaaacacaacactccagtcctagagcaaaccctaagtagcaacaaactttacttctgctgactctctgtctctgttgtttcttgtcttgtcttgtcttgtcttgtgattatgtgttttgattctgagttttggccaagtccgtcagtcgagaagtgccttacctaactcacagcttcagtcatttctcctccacaactgggtgcaggcacctgtatttggtctcagaccactgtgccactttcactgcctactgagaagagcattttgtgtctcctcgtttgggtcatagctgagtatatgaagtagtgggtatttgactgctaggcaagtctcatgaacacagtcacggggatactagtgtcttgtgtatctgatctgcatgtggctgttaagttttcctttggtggcaggaataattgtgaacctggcacttcgttctcatcatatggtgatctatcagctagatgcaggtaatctaactctttgcagggtgagagatgactgaaaacctggtttcttagcacttttcttttgtctgagcaagattatgtctcaggttcactggaaatgacaaccaacctttctgtcctcctgagttattgtgttctatgtttcctttcaagacatggctaaggttatagaaccaaaactgcaaccctcaatagctgcctatctctggaaattaaaaaaaaaaaaaagccttttcacctcattgtgtatgaataaaaccttgtgaaataaggattttctgtttttattatttatagatttgattacttatatcaatattctcaggattctcatgttgcagagaaactgaagtttaaatacattgtattgctacccttgaaaaagttcacagaaattgcttgtatgtaaaaatgcaagttcatgtaaccaaagtgcatatttgaccacatttaattgatttttttaaaaattagcttaaatagcattacatatctctcccttaatattatcactctgaattatagagttctgatgtacttttttgttttacagatttgtttttggtttcctgaaaagaggctagttaatctgaactccttaaaacttcttatactggtttaccaatgagacaagatagcattgacacataatgtttaaaatgaagatttaaaattatatgtaattatgttgagttagaattttggcaaaatttttatataaacagtttttacactttataaggtatcagttgacatggaatttccatgtttctattacgtttcagatcgtgagctaatgtaaaatcaagaagttaactggtggataatcttgggatatctgggttgcttctcattaagagataatattggcatgatgattaccattagtgtgtgtatgtctgcttatacctataaatgtctatatacgtcttattatttctatatgttacagagaaactgtaacttagagtcatgttaatgagcattttggttttgccactttgaagatgatgttcaaagaatgtatgtgtctctagggggttgttttatgcaagctcatgtgtataaggtaatggggtatatttttgtttacaaagtgaaaagaaaatatgttccaaagtatgaaacagtatagtgaatggcaaagcatgagtgtgtgtggagtatagaaggttggaggaaacagaattttatttacctcggagtataatatatgcacgtaatgagtctgaataaaaacaaggaaatgtgttaaaattttggcgaagtttacccagctttaattggttcattaataagatagatattttaagttttgtgaatctttttttctgccaaatactgcattaatgtaacactatagttttattttctctcttttaaaatggaatatttagcctgctcttaacaagaagataaattatcacttaccttctatgtcatcgtctcagacactttcattcccatcatcaacacgtggtttctgctttactctcatgtttttctgaaggttttgctataaactacagtctggaaatagcctttgtcagagaatggcagtatcagagcctcatggaaacatggtgccaaaaaatactcttaacctattggcacttcaaacagtcattggtatagactttggatattaaggtgtcacttagatgactaactgtactagaggatggaatcaggattttcaggactctttttaatagtccaggagcagaagacctttgaaaaccaggtgttgatccaacatccactagttataagacaagtaggattaagtgaactgctgaggggaatctaattgtggttatatggctttaatatcttattataagatatcttgggatacctgggtcatttcttttattcttttaataagatatggtcttttaataagatattattaaataataataaataagataaaaaggtattattaaataataagataataatatattatcttttaataagatatagctttacatatcttattaaaagaataaaaagattcattctcttcctgatctctttaactctctctttggtaacctataaatgacacattctttatatggcaccttattctccctgaccactcagaattcacagacaacttactagcttttatggcaatgtggttatttgtataaaatcaatacaaatttgtcctttttataaccaggctatagttgaataaattggctgtgtaaataaggtcacaccaggtgtgatggttcacattatgtgtcaatttgactgggtgatgggcccacattaaacgttgtttctgggtgtgtctgtgagagtgtttccagatgagatgagcatttgaattggggggcccaataaagaagattgctctctccgctgtggttgggcatcatccagtccaatctgttgagggtctaagaagaatgaaaggtgaaggaaagaggaagttgcttctttttttctgctttattgttgaactaggccatctcatctcatcttctactaccctcatactgggagttataccatcagctcccctggttcttagatcttcggactcagactgaattacaccatctgcttttctgggtctccagtttgcaaatggcaggtcatgggacttctctgtcaccataattgaatgagccaattcctcaaaataaatcatattccctctctctttctctgtctctctctctcctattggttttgtttctctggagaatcctgactaatatgccaggaatgtatctggtttattacaaataatacagatcttatttaatcaggtgtagcaaacccaccattaaggaaaaagtgctgtacttcaaatgtggaaccaggattcagaaagccctctctggaaactggtctgttatttgttctatgatttatacgatcataaacttacaggtaaaaaggaagacaattttctagtagaccaggaaatctatcagatgttgggcactcagagaaattcaccaaaatgtctaggtgctataggaatattgtgcagatgcatttcttgaatggagtttcttacctttgtgtggtagggtgaataaatgtcatgcttttccccattgtccatgttctaatcactggaacctagaaggtagcaacagaagctacacagatgggatcaagttaaggatcttaaagtggggagatcatcccggattatctgggtgggcctaatgtaaccacagggtccttataaaagggacccaggaagggtcagagagacagaagatgatgtgatgacagaaatagaagacagagagaaagagactgaaaaattgaaagatgctactttcaattgaaagattgctggctttgaggatggaggaaagggtccataagccaaggattacaggaatccctggaccttgtgaaaggcaagggaactgatttccctctacagcatccagaaagaatcggccttaccaacatcttgactttagcccaatgagacttgtgttagagttctgactgccaaagcagtaggagaattaatttgtgttgctttgaacgacaatgcttgtggtaattcacctaaaaagcaataggaaactcaaacaccttggaataaaaaagccagtaagagaaaaaaaaaattctggagaaaggattctgaaaatgcaatgagagatttcttttgaaattttcttacagaagttaattttctgtccttagtagctgcttgaaacagcagctctgaatttgctacccatatccagaggcttccatggtcaatgaacatcttgcactgcccccatgtaaattaatcaggtctaagcacaatgacatcagacttttggtaatatgaataatctttggaaattatttatgacacaatagggaactgctgagaaaattatctaaaacttggaaataaaacaaaagaacaacgactgtatttcgtttcaaagtcacatgggatcattgcctaacaggtccacccaaggatgatttaatcctctagaggattgtacttttgtttgttttactattttctattgtctaaggtcaagactatgaaattacatgtggacttagatattttttgttcaacagagacctaactgatgcaagtctagtacagaagatgacctcaaaggttatggttttattgcttgttgaacaataatcaattttgtctttaactcagatattcatttccattagcttctcctgttggactatataaccactctttctgtgattcttttttgaactagatttaccatccagatggttccttcattaaggagttaagtgtatttttggcacatgcttacattatgtttgcatgagagtcgtgttgataactttataaaattatatactgacaaatgcaaagtggcataaatgtaatcacatttggtccttacagcatctagataaggtaagtaggatggtccccagtttattgagaggaaagagatcctaaagttagtaagatgtacccagaggggttcagaaccagtctatctcatgttctttttcttcaccaaactgcatttccatcaatgagatgatgtgaaagaaatgaaagcatgtgggcttatttctccattttacatcctaactctagactttatatgggtcataaggagaaaacattctcaagcccaaaataaaaggagaaataatttaaaaattttctatcatcactaaaatcctgatttctcactcatttagtggcatgtttgaagtgtgagttgcccaagtggatccctcttggatctgctgggttccatttacaaagacaaagagcctctgctctggcttccaggatcctatttctcagtttctctggttcacctagcatggagcagcttctcctgcaagtcaatgtcacaaggctagaatgggctgtctgcaggagtagaaacaaaataagccttcagcgttttttgtgcagtcctctttgcaaggggtctcaggccaactggaattgacacatagcgttctatttgccatcagggtttagagtaaaagggatttctagaaaatgaacccttgacctttggctagtttgttgaaacacctctaatcttcttgctagcaatgcctttcacagaccttcattgcctgtcccattctgtttgttgaccactggattaaatgggtcccaggacggttttaccttctaggatttctgttttggattacttgtgtgtttctgctcatagagttaccacattaccataagtgtgggtgacttttgctgacttcagatttaactgtgagacagtaaagcatgttttaaagtcctttacctctagtcacacaactctccccacattgaaacttcttgaatatgccctacattctcttcccttcagtacattgtcagtgcattcatttctcaccaactcaaaatatctccttttctagtattctgagatatcaatgatgcttggcttttataaaacacatcacacggcaatccatgatagaattactttgtgatttgaaaagctgtatggaaaacagaaagattgagataaaacaggataatttaatataaacagtaaattaatatgtttctattggcctcaccaaaaagaatcacattgcatttacaattttaaaaataccgctaataggctatgcattgattttcacatattgtttacaaacaaattttagtcataaacctgacattgtaaacaagacactttcagcataacaatagtaatttaaaatgctacttaaatagcattttaattgctatcaagttttaaagtctgagcatgacatatttggagaatgactttggaatcaaatgactggggcttgaatcttggctctatctttgagtagctgggtgcctctttgcaagttgcttaacttcctcaagcttcatttgcaaaaattaatagtctttatctagtcgttgtgaaaatgaaaagagatagtgcttcaaagcatctaacacaggactgtccgagtggaagcctaacaaaaatccagttcccttatgatcttgacctacttaagatctcctcaactcccttacagatacgtgattactcatagagcagtttgcaatgaaccctgccctatctcaggaatttcttttatgctgcttgtcagtgaaaaaccaactgccctcctatgtcatcaataatatagtgcagtggtttttacattttaaatgagcacaaaatcattggaacactgtttttaaataagtactttagttagctttaaaaaagaagatcctcacactacaccataagaatcactggaaaagggctcaaagcttgtcagctccatagatctttgtctgatactcatgtttgctgaccaatcccaccagacaacttcaagccagttattaagcttggggtctgattacagttctgaagaagtttactctgatgattaaggtatttatctatctatctatccatccaccacccatatacaggaaattaataggtaaatagtaacactaataaaagtcttataaaattgggaaagtgagctgtggctagtatggccaatgtagtttttaggagaagatgaaaacattgagttagtcattgatgataaacaaggtctgacaaactgcatatttgtttatttcagtatagttattggaatgttgaaatgctctcatcatatggttgggcatgtacttattggatcccataaccctataatctagaggattttcaggcaaaatacagattgctatgggaaaatggtttttaatatattgtaggcaagggagatctgctgagtcttttcaaagactgcttgccctgaaaaaaataggtttgcccccaaagatcctagttgttataattattcttggggtcaccatatcctcataggtcattctctggggatttagataacaacccctagcatggcctcaaaccaagtttttttcccccatcgtttcctaaatggagcactagcctggtgatagattccctggcacaaccatagcaatccaaagctcatacattaatatggatctgaaggaggcctgtaagtaccagggctgtacccatggcccaggacctcctgcatcccgtcagtcctggaggcatttacgctgatctctgtgcattttccagtgtttcagcatggcaacaataaacagtagttataacttgctttgtgtttcagattcttcataagagcactttcctggaacaaaatttttaattgcctggagaataaaatccctcttttttttttttttttttttttttttttgggacggagtttcgcccttgttgcccaggctggagtgcaatggcaccatctcagctcaccgcaacctctgcctcccgggttcaagcgattctctggtctcagcctcccaagtagctggggttacgggcatgcaacactacatccagctaattttgtatttttagtagagatggggtttctccatgttggtcaggctggtctcaaactctcgacctcaggtgatctgcctgcctcggcctcccaaagtgttgggattacaggcatgagccaccgcgcccagcccccacctttctaatatactatttatgacttttccctgctgtgctttccacctccatctactgccatgttctgccccaatagctactacacataaactttgtgttccaactatgtagatgcttccccagactttgtgcacataataattcacgaatttgttcccagtactctctctccctaaaaattctctcccccagtaaatttttagaaaccttacttgatagaaagcgagcatcacaaaggcagggatgggtatctcttgtgtacactaatatatcccaacaaataaggacggttcgcagaactagtacatcctaactaagttcttgttgaatgagcgatagaatctatcaaggtcaattcaaatgtcacctcctctccgaagctgttccgaacccttttggatggaatgcatagtttttttctttggggtttactagtattttatttattaatatatcatattataacccacatcatagcagtcttgtattacagtttgttgtgtgcattttcctccagatgatgatggcttccttaagagcaggtgtagtgtgcattcaccatttgccttcatggcccactattcctttttttctttctttctttctttttttgatacagagtcttgctctctctcaggctggagtgcaatggcacaatctctgctcactgtaacttctgcctcccaggttcaagtgattctccttcctcagcctcccaagtagctgggattacaggcacctgccatcatgcctggctaatttttgtatttttgtagagacagggttttaccatgttggccaggctggtcttgaactcctgacctcaggtgatccacctgctttggcctcccaaagtgctgggattacaggcatgagccacggcgcctggccccactattccttttacaactaacaggaatagatgatacttaatatagctaattaagctgaattccgaagatcttccaagatatatgtaatactgctataatttcagaagatgcaaaaatgatatactttaatcagaaattattttgaaacatgagcccttctctgtcaaattttccaacgtcaaaggcttttgcggtttcacctggctcacaatataacctcattttgcccaacctcagtctcccgtaactttggatttcctgcaagtaacaagacttcagtgactctgggaaaatcagtttaccccacagggctcccaagtcttctataacctaaagattttgagcaaagcaatcactaacagtacacctgttctattctttcctctatttggcctggaaatttgccccaattcccaacaagggctgaatccagcacccaacagccttgggaacccatcctggacctctttgaaagctaacactgcactttcgaaagttaaatcagaaaaatggccaaagaagtatgtcctgttctctagtgaatcagttagactgtagtgcttagagactcttctaacatggaacaaagtctcctttttggcctcttctgctagctcaactattttcagacacaggagactgactgaacccatctcttgagggatacggtactctcttgtccatcaagcaaatacgtttagatttaaaaaaaatagtaatgtactttttctttcagctctaggggtcctttatcattctttgacaggcttttatcatttaaattccaagtgctcatttacttacaacttcttaactaatccttttgcagctgtgcccatctgagcacaaagacaggaatagggcttgcctaagtaatatcgtgatattttagcagaattgctgagcaagcccttcagtttcgtgtttctatcatcacattaagcaatactacttcaactcaaatacttttcagcatttatttcctcaggctgaggattctggggcttcaattcactcagcctctcaagaactttcagtcaagtgaggaaaagagtcaaataaatcccgtggcatttcatgaaaccgcctcaaaactacaaaagacttaattagactatggttatttgacttaatgatgttttaaaacaatattcacaaactgtgagtgagaaaaaaaactgcttgatgccatacttcaaagatgtcgctttcaaaattgctttaagcatgaagcaacatacattctgcctattgtagaataattaagttgaaatggtaaaagtcagttgtttcaataacattacagttcaatggaatcatgttaattagaataggttgggcttgttctcatttagatccagcttagtttcattctctctcttggtgtggagcaaaatttgctatcagccatcattgtataaaacattttataataagtaaaaaccagtgataaaagatgggctttgcagatctctaattagcaaactcccttgaaagtatattaatcaaaatacatttccaatttaatttttaatagtgtcattaccaaggcattaaaaagaaacataaaacaccttccagagaaggaaacacacatcctgggagcaatcgaagagttgctgccttttggtgcagagaatgcagcaagtgaatttagttcttttacggtgttaagcctcatccttcaataacgctgctgcagaaagtcagtctctttgtcttgtgtcacattttttacaccaatcttgttgccatttaagttcttgccatggattgttcccgtgtgcaagtttgagcaatcagtactgaatataaatgattttggaaaccgtgtgtagtgggagctcaacaatcaaaaagttaataaagtgatgctcttaaaagatgcatgttatgtgctgatgctgtcacctctaacaggacttccacccaaccgccatacatcccccaggtacccgggcccagtgccaagacaggagtgttttcagaagcgcttgcatctaaacattaaaacaggctgcttatttccatttaatggtcaattcattagcatagggaatagagaccattttatatctgccatcaatattttgcttagtattttaaaaatgtcacattgacagaggcctggagtgtgacatcagattcaaatattttcctctgcatccttaatgcatttcaggccaaacggcatgctgaagggccttctgggctgctattgtatagaccagtgttgaggatttgcaatggcttatttgatttagaatatgtttatttaaagtctgtttattctttattgctccatgctcatttgcatttgcatatcctttccattgttctgtggcatttgacatgtgatactacttattctcattaatctctcagttccagtttatcacattgaccctgactgaaaggcttaggatgacctagtgtcccttagtgtcaccttgataatctctaattgtccttcacctttcatctttgatatttcttcctccaagaagccttacctaaacttcagagacagggttagcattcttcctagggttcccatagtttcctgcaattatccctattaatgtacacatggctgcatgaaatcgattgcttacttgtctgcttctcctgattaacttttgattcactgagggcagggcattcgggcttcatgaatgcaaatccaaaccacaatgcgataccaccttactcccgcaagaatggccataataaaaaaaatttaaaaaagtagatggtggtgtggatgcaatgtaaagggaacacttctacactgctggtgggaacgtaaactagtacaaccactatggaaaacagcgtggcgattccttaaagaactaaaagcagaactaccacttgatccagcaagccgactactgtatatctacccagaggaaaataagtcatgaaacaaaaaagatacctgcacatgcatgtttatagcagcacaaattcacaattgcaaaaatatggaaggaactcaaatgcccatcaatcaacgagtgaataaagaaagtgtgatatatatatgcacaatggaatactactcagccataaaaaggaatgaattaatggcgttcacagcaacctggatgagactggagactcattattctaaagtgaagtaacttaggaatagaaaaccaaacaatgtatgttctcactcataaatgggagctaagctctgaatatgcaaagccataagaatgatacaaggggccgggtgcggtggctcacgactgtaatcccagcactttgggaggccgaggtgggcagatcacgaggtcaggagatcaagacaatcctggctaacaaggtgaaaccccgtctctactaaaaatacaaaaattagccaggtgtggtggtgggcgcttgtagtcccagctactcgggaggctgaggcaggagaaaagcgtgaacccaggaggcggagcttgcagtgagccgagattgtgccactgcactccagcctgggcaacagagcgagactccgtcaaaaaaaaaaaaaaaaaaaagaatgatacaatgggttgggcacgatgcctcacgcctgtagtcccagcactttgggaggccaaagcgggcagatcacgaggtcaggagatcaagaccatcctggccaacatagtgaaacctcgtctctgctaaaaatagaaaaattagccgggtctggcagcgtgcacctgtaggcccagctactcaggaggctgaggcaggagaattgcttgaacccaagaggcaggggctgcagtgagccgagattgtgccactgcactccagcctgaatgacagtgagactgtctcaaaaaagaaaaaaaaataatgattcaacggactttggtgactcagggggaaaagagtgggaagggggtgagcggtaaaatactacaaattgggttccgtgtatactatttgagtgatgggtgaccaaaatctcacaaatcaccactaaataacttacttatgtaaccaaataccacctgttcccctaaaacttatggaaataaaaaattgaaaagtaaaataaaattaggacctaagaaaaggaaaaactcatattcaatgatcatactgtaccacttggtgaatttctcagttaaacacactgaacatatttctttaatggaggcatgatggtagaacagaagcagcaacagaagcagcatggattttggtttcccacagccccagattcaaatctacctgcacctttaccagggacaagttgatcaaaccaactgaggtctattttgccatttgtcaagcaggaatataaaaatctacagtgcaggaatgttgtgaggatgagagctaaatattattcatatctaagcatcaaaggatgaccaaagatagtcacggttctctttactcctgagagatttccattaagtgcagtgattggattcaacctctatccttagagatgctgtgtcatctgcaaagcttggctccttataaagatgtgcgtgtataaggctagtataaagcctatgatgttaagaagttattcgccaagtaatttaggatgtgtaactgcatgcatactagcttaaatgttgacagggacccagaccatcttgaattggccagcaggtaaaagcaagtatcagctctgcagttttcaaatgttggatattaactgagacgtaacaggtatttcttgcctgagtggactttttcttgcagcaaatcactaggtgatttcatgcaaggtttacagcagttttactgggatgagggcatctcatgtgaaaggttacaaggcaagaataaaatcagaattggcagccaatcaagcaatttgttgaaagaaatggcttgtttccaccatggcctttctttaaacttcattgaaatagaggacatgctgtaccctttgagggcaaagcacttcgttagacttgcttccagagagatcgtcacctattttcattctctttaggataagctggacttttctgaagttaaatctcacttgtgattttctctgaggctgagataccagcaatttgccttggaccaaaggaaaaaaaaaaagctgtgaggtgatgttttggggaaagacactgaagttaagtgaaaaccaggatgtgttttaccttcttctctagtctaagttacataaatggtatgaaagtcatatatatatagatatatatatctatatatatatagatatatatatatagtaataatatattatagtcataaaatatatatcatatgtagttatatatattatttcctagagcaatgtgtgatatatatcatatatgtaattaattctatattctatatatgctctctgtatatattatttatataattctacatatacagaatttggaaaaaaaatatatatcttatattgctctaggaaaataatttaaaatttggagtattctttcttggcactacataaccataagctttggaggacactgactaaacccaattgtgaattaatttagccaacaatgtgccttcctaaattttaaaaagaagaaagccagccttcaaattaagagaagacaaaattctagtttctcaattgtcagaaacagaaagtaataacagtacattaaaaaatcatttctgaatcataaatctttgctcatacacctgttgagagaagtcagggatgacacataggaactggtaggaattttcagtttcttcctaagaacactcaaatgtggcacctgacagaaatcctgctatgtaactagaaaattgatataaatattcattgggcctgaggggtgtgtgtgtgtgtgtgtggggaagacgatctaaaacctaaaactctttgtttcattctcaattcaaaatgcagatgggcaaattatgcatctatatagtcccaagctaaagatccaaatttgctaatttcttactttgtagtaatagtgaaccctcttgctataaattccacatagtgtgatcatctagttctgatttgcccagtattatctagattttaaaatggaaggtcccatgtccaggggagatactctcagtcccaggtgaaaaccagaatcatttattaccctacttctaggacaagactggtatgaaatggtcttttttcccagtaagtagcctcaaagtatcagtcagggtgtactaatttcagaatcagtaaaatatagtgccccacagtatagatacaacatccactttacacttggtaggttcccaggatcatagcactactggagaaggtcacatggattctctaattccttaaatttgtaggcaaatcaattatttataaataaaatcatatgtgaggtgttctaagaataacttcttttttcttttttttttttgagttggagtttcgctcttgttgcccaggctggagtgcaatggcacgatcttagctcactacaaccactgcctcccaggttcaagtgattctcctgtctcagcctcctgagtagctgggattacaggtgcatgccaccacacctggctaatttttgtatttttagtagagaaggggtttcatcatatttgtcaggctggtctcaaactcctgacctcaggtgatccacccgtctcagcctcccaaagtgctgggattacaggcttgagccaccacgcccggcctctaagaatattttcttgctcaaagaatcctatagtaaacctttttaaaaagtagttgttcttgtattttgttttgaaaagctgaattgctattctggtcttgtttaagttgggagtactctacgttggaagacatgctttagaataaaatctacatggttgaaatcagtgtttcttctcctacctatagtagtcactattggtgtcctgtcaaattctcctccaccagcttggtacattcatgccctagctacaggcagtgttggttatccctggtctacaagagcctgctggttctgagatgccagggagatcctgtcccaaattcccagaagggtgatgaccaatagccaatgaatgagtactactggggtatgctagcctcctagggggaccatgcacatttggatgaaaatttatgttctaaaggtcccctgtgggatatggctaatatttgatttctcctagtttcttcctctgtcttatccaaccttccttactccattactcatttctcctgagagcgcttcctcaataggtcacttgcacaagattccccatcttaggctgtccctctagggaaactgacctctactatatcttatgatatgtgaatccataatttactaaaattttattcccaactggcaaatttgctgtttctttgtctattcatggtaataattataatatcttcaagacaatgtggaaacttactataagatcataagaaggaggatgatggaaggtaacaaattgactgcctatcagactatatatcatctcagttattgtatcagtctgttctcatcctgctaataaaaacatacctgagattgggtaatttataaagtaaagaggtttaatggtctcgcagttccacatggctggggaagcctcacaatcatggcagaaaatgaagaaagagcaaaggaacatcttatatggcagcaggcaagagcgagagcatgtgcaggggaatccctctataaaaccatgagatctcatgagacttattcactatcacaagaacagcatgggaaagacccaccctcatgattcaattacctctcacagggtccttcccatgacacatgggaattatggaaactataattcgagatttgggtggggacacagccaaaccatatcagttagttatgacccaaaccctgcaagacaggcttttgaaaaatctccttaaaaaaaaaaatcaataggaagctgaatttcaggccaagatgacaccataagttaatgagaaacccaagcttaacttaggttgtctcattccaaagactttgttatttgtgtttattttatcttcctttacttcttcgtttttatctttaattgctcaatgtataaatccagcttaaaaatacccttatttcatgaataacctcaataactctcaaaatgaatattgtttagcttgagtttttcataagctataattaatttcaaaagttcatactgaaataaataaaatagaatgaatagaaagcactggtataatgtagtaggtgtttgaccctatataagagtcaacatgctattcactaagtataaagtgtggattctccaactaaacacttgcagaataattgtctaatgccaaagtaatctttcatagagagaatttcatttattgtctttatttttgaaatgttttgttggcaaatcttgttgacataatgtggataattgccatctttggctgaacgtgttttttgtgtataatgatgctatgattttatttctaaaaatagtgtaatgaaaagaaaatgtgtaatgcattgaacagagcaaacttagtagaggttcaaaattaagtgaacagtttgtcacacttaagatcttcattattcctttaaaattaaatcccttgcaattattgaaattgtcctctaaaatatttggcagtgactacactcatgacatgtattgatgcagaaaaatgtttatttttccctttcttattctgaagaattttaaacacaaatgctgtcattccttgattagaaccttttttgggttataaatcatgactagactacttgagtgaatctagatttaggtaattagatgttagtaccagcctgttttccattgcagaatatttaaaaatggtataagatatttagaagggaggaaaaaggcattttttagaagtcattttttaaaggcattgcctttactcttattaatcatgccacttaaattttaaagctgtatttaatatggaatcaataaaaaaaagaaatgagtagaaaatctctaacatttataaccaaaaggtcagctcaagttataacttttgtcaaaacctgaatttccaaggcaaaccttagaatcatctatttaagtaaaagccaacaatgaatgttttcctctgtttctctgagtgattcttcttaagctgcacatagaggaagtcagtattcaagtattattttcaagttgtaattagcttgaagtttaaatcactagtttgtaattttaataatgtagatgactaaagcccaggctgggggctaaacctgtgctttggcttacggaggaccaagaaggaatggtgtgaggttagtggagagggcttgccctccttctctgcaagacccatccactctccagctcacgtctctgactctcctgctgttctggaaattagggagaaagaacagtttgatccaggcctttcttcttcccttctcactacctcctgttcctcagggtgagctcatagcaggtctgtgttgctctgttagatccttatgtagtctgacatgtggagggcacgaggccatgtttattttgccttaagttaattgatgtgtctattaatatcttccgtactgtggattgttatgaagctttacttgtgaataatgcaatataaagcacatcgtaatatatacctcacgccattggttatattgaattatacaggggtagaggacgggcaacataattaactttatcttaatgcctaaaatgcaatctttctcaaacttgcataagatcatctaagtttctgggaagtgaatgtgagaagtaattcattttcagaggttttgtcaggtgatttggtgcacacttaattgtgagaatctctggcccacagaattgttctggatccttagtagagcatagaaggcccttgattatctggcctctgctgataccatttaacctcttaccatacttcattcagccgccaaccagttcccaagagtggagtgttcttccccaccatgctgcctgccactctccaattcatcctccaaagctgaggccaaccctcatgtcctctgagaaggttttaaagtaacttaagtactgaggtggaagaactctattgtccctgacaagcactcccccatatctgttataatgtgaccaaatgtatgcaaatatgtaatgcacatatttgctttcatgtctctcttcatgttgaactctgcttcctcaaagttagggaccatgtctctcttgtcttattagtacaattcctgccagcacttccagcacatagtatatcttgctcaatattgattgcaaagtgaatgtttcagagtcatcctagtgaatgttatgcatgactatttgtcctttaattaaatggttgtacccctgaagagtgaatatgagtaaagttatgggcaaagttgtgtccccccaaatttgtatgttgaagccctaacccccagcagcttagaatgtgactatatttggagacagggcctttatagaggtaattagggttaaatgaggtcataaaaatagggccctaatccaatatcttagtccatttgtattgctgtaacaaaataccacagactaatttatttttaaaaagaaatttgtttatcacaggcttggaggctgggaggtctaacattaaggtgccagcatctggtgagggcctttttgctaagtcatctcatggtggaacgtggaagggcaaaagagcatcagagaatgcatgcacatgagagacgggggaccaaactcattcttttatcaggtatggataacagcagtaatccattcatgagggcagagtcccatgctttaatcacctgctgaaggtcccaccacttaacgctgttgcattggggattaagtttccaacacatgaactctgggggacacattcaaatcgtaacatccagggtgaacggtgtctttataagaagaaacattgccagagatgaacacatgaagaaaacaccaggggaggacacagcaagaaggtggccatctcaagtcagggagagaggtctcagaaaaaaccaaacttggtgacaccttgatgctgggcttccagcatcacttctccttttatttgtatttcaaatagaacttgtattaatagggcactgtttgacaattctctctctagtttttgctaattgattcatgcactccagtcataattttactggtggatgtcaatgtttagcaccattggtttttgtatgtgttgatgagcacactatttctagcctggaaattgtgaagaacaatcagttatactaaatgaatcacccagcatattttcaatatgaacctctggcaaggagtcttcctttttgccctggatgcctgaagaatgggttccattagcaatgcagtatttgaaaacaaatgttgcatgttgaaatggtgatcaaatcacatttcaggagttttgcagttgtaagagggcctattccaacacttactacacaaattcaaagggtaaaaaatttgagttatgtgatgaaaatattttaagacaggaaaatatggtttaaataaaccctctgggttcctgtagaggactacttgttacctctgtagcatagtttatcaggttcttgtattacagtaactatgctagctattatcttaactatttgtattgcaaacatttattatgtacttatatataataactatgtattatgtcagttattcatgttagcactctctttcccaattagttgttaactttttgatggtggaaagtattttacttacgtttgaattccattactagcatttggtagatatccaaaatatttgtggaaggcataattgaataaagcagcacttccaaaagttacacacatttaagtcatgagagaaaagtagagggaaggtaccaagacctagggaatcaggatctgctttctgctggcaatgacactgaggaaaggtgacaggattacaatgtgggagaaagagattcccgtgccccacaccatcaccccattgtccctttttctctccatggaagatttgggttggtacacatggccttgagcaggtcacatgatttcacctctttggtggtggaactgaaggggcagtcagactcaattcctgtgcattcccaaatcagttcttacacctcagttcaactcttatgagatttttctttgaattttgaaggctttccaagtttaggaattccctattggcctgtgaatgtgcaggagaggagtgacacctttaaacatgaattaataactcattaattaaggtaatcattcatttggttaacaaactttccttttgttaacactttagtatagaatttctgagagtaagatcaagaggccaaggtacccttggggaatatagcaaaaggaaaagagaacagagaaggcattttatggatttcaaaaatttgtttatacttagtcctgacttttgaatagaagacttagatgcaattcatcatggcattatttcatttgtttttaattaaagaaggctcactcagtatctattgtataaacatagccctgatggaataactgtacaattactgtctttctcaggtccacagagtactgtacaatgacaaatatctgaaattcacccttcatctaagcaatgtaatccatgtcaggtcacccacaattttaagtcagttctcagaaaagttatttaaaaacaaatctgaagtatacacaataatggtgatgaaaataaacattaagcaaaggaagaaatgataaacataacctttagaccacacaacttcctaggatgtcagctatttcaggaactgaaatgatgcatttatcatatgttcatctgttcaatatataattattttaactattatgtgtgctgtttataacccattatcttgcaataacagcttgcatggatcactgcataatttaaaaatataatagcttttcttgccaatatttgatttccaactctaaatctgctgactttaactatgtctatgccatgtactctgggtaaactggtttttatttcctaaggatttatcttagaatacacacctgggttttcttttacaaaaagctagttttgtttggctctggttcatgtggtggcttgttttctgaaatggaataaattggcttctgtacatgcaaatcaactaaatgggcaggatcacaaacctgagacattcatataggtgaagtgggtgggaatggggctcttgtctaattagctagataatgtggtcaataaaacccaaaaatcagattagtcagtctcaaattactcaaattactttgatcatattaatcatataattgtctttgttgcccagatgcctatcattataggtaaacaatatgttatttatggatggtttatctatgaagatgaacaatggattccacatgggttgaattcatgtcttgctctagttagtctggttgagtgagatattatatttaaagaaatatttatttatttagtcaccaagatttattgagcccctactatatgcaggaagagagctaggtactaagtgaataaaatgaatttaacagttcttgtttccaagaaatgcaatgcgtactggagaggtagacacatagaaatgtatttatagtacaatgataaaaatgcaatggtgaagatatacacagtgtagttttggataaatgaggaaaggagaaatgtgtgtgtgtgtgtgtgtgtgtgtgtgtgtgtgtgtgtgctatttgcaaaagctttctggaaaatgtgatgcctgagctgagctgttgggtttagtccaacatagaagaagagggagtggcagaaagggcattcttagcagaggaaaaaagatggacagcagcacaagtagacactgaggaaaaggcacaatgtctcatcctgtgattttggagaaagagaatgggcatgaaaaaagtttgctaaatgggttgttggaaattgaaggtgttcacacctactaagttcaattttctttctttctttttttttttgagacagagtcttgctctgtcacccaggctggagtgcagtggcggatctcagctcactgcaaactccgcctcccaggttcaagcgattctcctgcctcagcatccggagtagctgggactagaggcgcccgccaccacgcccggctaattttttgtgttttcagtagagacagggtttcaccgtgttagccaggatggtctcgatctcctgaccttgtgatctgcctgcctcggcctcccaaagtgctgggattacaggcgtgagccaccgcgcctggccaattttctcacataagttggcagtaagttgagaatgaaggtagtaaagtttgaattgtggcccagtgaaataataaattgccgaggggaatggaagagatgagtagacacaagtaaaaggattgagaggtggccctaggagcctagctactgttggacaccgtggatttgccatgaggtggaactgcaaggatggatgattttttgagatacatccttgcctgggcatcgggaaagagaaggcacactatagtactgacacagcattagacttttcttatgtgggtgtagcagaaaatgaggtgaaaaggaattaagggtattcctgaaaaggtagtattctagacggttttgaaaagaaagagaagccaataggaggtagatagataaataaaatggagggaacataaagccagggatctccatgaagcaacagaaaaatatagtatggagaaatttgacactatatagttgtggtaggcagaattctgagatgaacctctgtgacctatgccctttgtaattccctccccttgagtgtgagtgggacctgagaatatggtgggtgtcattctattgattatggcaaagggaaaggaatgttttgcgatgcaattaggtatctgtaatcaattgactttgacttaataaaaagtacgattatcctgcaggggagggctgacctaatcaaaatagttctttaataaaaagggatttagaaaacagagatttgctctcttctggtcttaagggaacaagctgccaataatgtctgcaaaaagtgaattcttccaacaactacgtgagcttggaagaggaccttgaacctagaatgagactgcagcagccccagccaacacccttctcagcttcgtggaccctgagcagagaacacagcaaatttgtccagacttctcatctacagaaactgagataataaatgattgttgttttaacatccctagtttgtgtgtgtgtgtgtgtttttgttttgttttgttttgttttttgtttttgtttttgagacaggctctcttgttctctctctgtcacctaggctggagtgcagtggcgagatcatggctgtttgcaacctctgcctcccgggttcaagtgatcctcccaccctcttgagtagctaggaccacaggcatgcactactatgcccagctaattttttttgtttgtttttttattttttgtagagagggggtttcaccatgttgctcaggctggtctagaactcctgaactcaagtgatctgaccacctcagtctcccaaagcgctgggattacaggcctgagctactgcacctagccagttcgtggtaagtttttatgcagcaataggaaactattatgctggtaaagctaaaaatgcatacaagcagcagtcctacttctaggtgtatggtctcaagctgggttgttgttacagattgaataattgtgtacccccacatttatatgttgaagccataacccccaatgtgatggtactagcaggtgaggtctttagatgaaaattaggcttagatgaggtcatgaggtagagtccccatggtgggatgagtgtccttgtaagaagagacatacagcagtgctgcttctctttattatgtgagaatacaatggaaagataaccatctacaagccaagaagagggccctcactggaacttgaccatgatggcactttgatcatggactttttagcctccagaactatgagaaataaatgccttttgtttaagccacccagtctaaaggattttgttatagcagcccaagctaagacagctgttcattatggtagctggaggtggctgttgagcacttgaaatgtggctagtcagaactgagatgtaccataagtgtaaaagacacagtggattaaaaagacttatgaaaaaaagtacaattgctcattaataatttgaatattgatgacattatgaaatgctaatattttggatatactgggttaaataaaataagttattaaaattaattccacctgtcttttactttcaatgtggctactaaaaactctaatatatatgcaactcacattatctttttattggacaatgcaacagtgcttctctagagcaaatcttggatttgtgcatgagagcctattacttaaatgttcaatttaagtaattaagtaatgaagcattgtgtgaatgtgcaggaaaaaaaaaagaggcagccaaaatatccatgcagaagggattggacaagtacactgatgtgtattcaatgcataagttgttccctctacttggatctttcatcttcttaatatttgcatgctttgctccctattttctttcagagatttattcaagttccatgttatctgtgagaagttttataatatagcaatgcccatttccctcttaagggcattgtatggtatgcccttccctcttctgagctttgttttttcaatgatccttgtctgatttccctgactagagtataagtttcatgagagtgaggacttttctttgctcctgattgcattcttggtgtctaaaagagtgtctgccacatactaggtattcagtaaatacttttggaatggattaattatagaatactagattttagtgaaaaatgaatgaactggataaataatatgtaccaacttagatataattcaaaccttgagataattgcgaaagcacactgttaaagaaatagatacagacacaaatacacacacacacacacacacacacggtctcacaaaacatgtatatcctcacttccctccataaatatgtatatatatatgtgtaaaatgatattcatctaagtaaattaaacatgtgtgcacctgtgtacacatacatacacacatatatcacagactgtataaaagcaaattctttaatcaatgtggggtagaaccaggacattagtagttgaatgggaaaacaagaataattgacatgagtccctgatgctattttataaatatcaatgttatttagaatcatataaactaagaagagtttggcagaaaccttcatctgaggccaacactcccttgcaacatttcttgttggagactgttcacccagccactgattgactatttcaggaataggtgtcttagtgctttagttattgctgtggttcaaaggcttttgtctccttgaaaattcatgtagaaacttaatctccaatgccacagtattaagaggtggggcctttaggaaaggattaagtcatgaggctggagccttaatgaatggcgttaggaatcttataaaggggctggagggaattagctaggccctttttgccattttgcttttccaccatgtggaaacacagcaagaaagccctcgccagagactggatgctattacctttatctgggacttctcagcctccagaactgtaagaaataaatttctggctgggcacgtggcttacgcctgtaatctcagcactttaggagctgaggtgggcagatcatgaagtcaagagctggagattatcctggccaacatggtgaaaccccatctctattaaaaatacaaaaattagccaggcgtggtggcgcacgcctgtagtcccagctgctcggaggctgaggcaggagaatcgcttgaaactgggaggcagagattgcagtgaaccaagatcgcaccactgcactccagcttggtgacagagtgagactctgtctctaaaataaaataaaataaaaataaataaataaataaataaatttctgttctttataaattagccagtctcaggtgctgtgctattataatgcaaacaaactaagatgtttatatataagacaaaacctatgtaattggtaaaaatataaacgatgaacctttagaaactaatctattttatccatccagagttgtacagggaattgagggaaggacctaaaaacccactcttccttaggtctaaatatcctaaatgtgaggggctgctgggatttatggctttcttttacacagtgaagactagctagggatgctgaagaatgaggggtcagaatgcagctaactttcaagaggtgcagaatgagaaatagaaatggaaattttttctgaagagtagaaatttgattgaggttgctgccagacccaatgtcatctaattaaactaagaaacagcttgtcctggcaatcgagatcaaatggcatgcattaatgggaagtgttactcagtgaagacacagtaggataaaaatatgtcagagcttacgtttcaccagggacttttttattttcaatactgtaattttttacccagatcccatacaaaatcagccaaccaaccaaccaaacaaacaaaaaccccactccatagtgacctactaagtaaaaatccaaacaaatattaagcacaggtaggtgcctaaatgaataattttattttttactctttgatttttaaaagcttgaattcaaatattaggtttatatattcaaatgtataatctccatttcatcaaaatagaaccataaattacatttttcatagcaaagcagtggcagaaaactgcccatatttcatatacctctcagtgacatcccataagcactgatatttagaaataatttttcattcttatgcagtaaatttattttggagcagatcaattaggaactatttatatagtttaaaattgagtattagtttagcaaaatgtgttaagaatttgctagaatttaactttctggcttcagttcaataagcatcttttaaaatgcctgccgtgtacaggcacggtgctctgaggacacaaagataaattgactttctgtcccacagaaagatcttacggtgctgagtgaagcatgttaagtgctaacataaagatatatcagagctacggagttgaaagcaggatacaccctccagcagaggttcaggaaaggctttctagagaaaagaaattctaagagttggtctaagtgaaaaatgggaggtagggctttgcaggcaggctgaaaggtatatgacaaaaagggtgttattaggcaggtttagtcaggaaaacaaaaagccatctgtctccactctgtatggaactggatggtggacacaggaagctatgagcaagtttgtgttcgtaaagggtagaatacctactgcacatttatgtatatcactttgcttatatgtggacaatagttacaaaagggctgagattaaagatacagagcctagttggaggctattttaacagtccaggtgaaaaatgatgagggcagtgggcaaagaaggttgagaaaaaatatctctgacagacagttgacaggacttaatcagatgagtgtactgaggggatgaggtcttagataacctgtagagctatggtttgagtggcaggctccatcgtactgtaatgctttcactcaggtactagtaaaatgggtatcaggacaccagagtgggagacagacaccctcagtgttcccaatacataagtataaaggaagtgttctccagagatggttctagatcttgtgggcccaactacgaaatcaagcatacataaaagaggtcacgagagtggtagaggtgattgctgaagagacttctctggggacagctgttgtctctctgtgtgtccacactgcccagtcttgtctttgggatgccactttctaacaccactcctggtgaatagagcttccagggggtcactcaagagaagtctgaaataggttcactgcagctgaagacgcagaagaccagtgactgatataaatgtgagaaaggcaaagtggactacagactgtgatgtgactcccgagtgacaaaagagtgctaaccagagttgaccaattggttttttggctgacagggagaagttggttgcattgggattagagacaaccccagaatttccaggaaaggaataagtgagtgtttcctgtgcaccagatttaaatccagcatactttgtgggaatgtcctgggttatagtcaatgggactgtctaaaggggtcaggaggcttcagcagagagagcatgaggtgtactgctggatgtcaagaggctgaggaaacagtgcaagcttccactgaaataggaatccatcacccaatgagtaaaagaaacttcagaagagacggtcaaacaggaactcatagagtcaaaaggaaatgcttcaagaaaaagaattagcttcagaaatctcccaggcctaccagggacaccatcttaaactgtctgctaagcccagaaagcacagagcagcccagcccagcgagatctgtcctgtttatttttgagcctagtagaaggcacaacagccacaggagttgggaggaagtaaacagggaaaggagaaagaggagaaggcattcatcccccctccgtcatgtcactagtcttccagaaggatcagtctcagagaggggaggtatttgatgttaaatcaacttggacttttgattaatatcttagactggatattctaatcatgaagttgaggctgtgctttaacataaggaagctctaggactgtcattaccttaagtcaacaaaaaagtcatgagatttgcccagatcattctactgaataattttaagtaggaggggagattaaaaatagaattggctttgctgtttcagtagttgtgtttgtttgatataccagttgcattgtcgttatctgacagtggagctattttaacaataatagatttaacaggcaaaaaaataatatatcctgatggagaatttgttgatatggaggtagcagcagaatcaccaagtggaaatttccagaagggaggtgactggatgaatttaaacttaggggaaaagttagggttgtactcaaataaacacttgcatatttctcttgaataaatctgtttccctttcagctctttatgaatggtgatcacttctaaaccaagacatctgcaattctgtccacattaatctttgttggtttacctgcttcaatcatacctatacatagctaccaagataaactatctgaaacttcgttttgtctctgcctcaaaaacagtggctttttttttatatcaattatcagtcaaatttgaattttagcagacaacttccaattgtctttccacatttacttaaacatatttttcactgcttccacataggatcactccatctgggcccaacaggattccttatgcttcatttatacatttgccattcattatactggaatgccctttcaaccaaattctactctaaaactcaattcaggcaccttgaatgtgggttttagggaagccagggtgtctttaaggccactgagattatagacaaatgtgtttgcattttgggggacaatggatttatgtttaaatcagttttaatagaagcactgtgacccagaaaataactaaggacaactgatgtaacgtaagatctctgattcccggttctgtactctgttcactgttcttcccagcacccctgattagaaaccttcttctttccagatgcttcagtgcttgctgctaccacagctgctccactgattgtcctatatccagctggaacctaatctggacacagcgtaattcttggcttcctcggcccctacattcagctaccatttcccagactgacctgagaagcagcttgctatggtattctggtagctcatgctgtagttcaaatgtttgtttacccctaaaattcatgtgctgaaattctaaccctcaagacaatggtaataggaggtgggggctttgggaggtgaatggatggcactagtgcccttataaaagaggcccttgagagattccttgcccctttcaccatgtgaggacaaagtgcaagacagctgtctatgaactaggaagccagccttcaccagacaacggattctgctagcaccttgatagtggacttcccagcctgcagaactatgactagtaagtttctgctgttatttgacacctggtttatggtattttgtcacagcagcccaaacgaaccaagaaactcagccttggttgaggtgaatttttgcctaatgtcttttcacctttcttgaacaatcatgtgtgtggtctatgattgaaagtcctcatttcctggcttcgttgcagttggcctactgcatgctgcatgcctgtctccatggaactttcggttttccaccactaggtactgtcttccattttgcaaacaactgctactttatcctagactccaataataataatgatgactccaataataataatgatgacaccaataacagtaataagaaacatgcagtgcttataatatgtttggcaatatacttaatgtttcctaggtgttgccttatttttcctgaccactaccttacatggtagacattttttttttaaataaaggaaagaggtttaattgactcactcacagttctgcatggctggggaggcctcaggaaacttacaatcatggcggaaggggaagtaggtatgtcttacatggcagcaggagagagaggagaaagcgaaaggggaagagccccttctaaaaccgtcagatctcttgagaactcagtcactatcacaagaacagcatgggggaaacgcccccatgatccaatcacctccctccttcaacacttggagattatgggtaccccactccacacgtgaggatatgaattcgagatgagatttgagtggggacacaaagccaaaccatatcagttgtacaaagaggtggcaaaataacaattacccgtaaagtgcaatacagaaacaaaaggctactttgtgatgttagaatattaaaaacataatcctcacataaatatgtcaaagaaacataaatatttatgcatgagaaaacaagcaggtaaaactagttcaaaggaggatacagtggactgaattatacatgtacattttttctgtaagttcatttcaagaaaaggtgttaatctaactgcaatcttactccaatagacttccttttcttgaaaatggaaaactgtttttcattttttaacagaacctttcatttgatggtagctatccttcattaaacaatcactacatgacaaatattttgctaggctatacatataaaatatgtaatccctacaaacttatggtgtgggcattttattacccatgttatagaaggaggaactgagaaacaagctaaatgacttgactaagttcacactgacagcaaagtgtgatgaaatctcagaatctgtgttcccagcaccagagttaaataggttggtctttccctaaatccctgcctcactctcctatcgaaacctatggccctggtggacaggtctagtccagctcctgactctgtcttattgaattgtttctggatatgatttttatgaacacagtgtgtcctgaagcactgcacatgcttatagattgtgtgtgttcttcggttcctttgctaattcattcattaattcattcatcaattcattcacttgtttggcatgtatttattgggtgcttattctatgtccagcattgtgcaagaactagggaattgagactgaaaacgcatagcttggagatagacgtggaaacaaacacaatagcatacccacagttgtaatggaggtacaaagcctacatctgtgagtcagggtcctgcagataggagctagtgcttgagttgagacgtaaagcatgacccagaggagcacggcattgcaatcagagttaaaataatttggtaggagcatattgcatattcaagggagccacagtaggttcagcaggtgctgcagatggagcaggagatgagagagctggcaaagggatcaggaacaagatcatgagcctgtatatcctgctgaagagtgtatgttttatcctgaggtataagaaaaagctttaatgaagcgtgtcaatcctctgccatgtagaatttacattactaggtggcagaagccacctcttctacttttcaagggtgttatcccttaagatgccaagttaatattacttatgtagtggagttccagtaatgcttgttgagtgggaatgtataatctcctagcatgcatttgtttagcaaatgctcggagagctaacatagtaacatactctatcatgtttcatatgttctttaactcttcccctttatctagtcagccccatacactgaaaggcagtgagctggaaacatgtgtctgaaaagcttactgattcccaacagtgtgtggagttatcagaaattaccgcacatgcaacaacctctgctcaggaagtttacctcctgtgatgaatttggtcttcaccccataaattcaatctgctgacttgcttcttttcatttttttttttctgactctagttttggaacttctttacaaagtgagaataacttaaaaaaaaaaaagaagcagcgggggaaatttggggaccaagttccttatttcatgtttcctaatgaaacctgatacttgcaaaattttgttcagttatgcactcatctgaaaaaacacgtgcactttctcttttgcatgttttaggttgtctcagaatttcctcagtgccagtcctccagcaggctgaggcattgcttctggttaccccattccatcttctctgtaggtacctacaccctgccaaaggtagcatatgacatcctgactcaggagacaaaagaggatgagcacaatgttgacaatggtttctgattcattcccccctcccttcctgtaacccctaactgtggagattaaaaatgagagatttgcttctttggagtgaatgaatataaaatgccttcttattttcagtgtggtccctcatcttggagctcattatttctttaaatatgcctaaatgtggcttggtaatttcaccttcttatgcgacttaagtacaagtgataaggtgtcttgggggctcttgagtgtttgatcccaagctttcatgtcacttctgcctctccttgaacttctaggagataaaagaaaaccagctgttttcttgttaaagatcaaggtaatcaggatggcgattcaggacacaaccatgatcactgcagggaaaaggaggtggtgtgatgtttttctattaggcacagtgtgtcagagttatgtagctgtcagaaaaggtattttgtttcatgcctatttgtgatgtctttgttgttgttgttgttgttgccagtttgaaattcctggtatcatcttcagtaaactgaatgaggctattcttagtggtgccttccaatggcaagagaatagtatttcagatgcttactaggtttctgaactattcttcacaagcatttgcctaattctttatccttacagtcatgctgtggggtagatgatactatacccatcttatagataagaaaactgagagacaagaagtgtaagtaacttgctgatatggttttggtgtgtccccacccaaatctcatctcgaattgtagctcccacaattcccatgtgttgtgggagggacccagtagcaggtaattgaatcatggaggcaagtcttcccatgctgttctcgtgatagcgaataagtctcatgaaatctgatggttttataaatgggattttccctgcacaagttttctcttgcctgccaccatgtagacatgcctttcactttccgccatgattgtgaggcctcctcagccacgtggaactgtgagtccattaaacctctttttctttataaattacccagtctcaggtatgtctttatcagcagcatgaaaatggaccaatagacttgcccaggttatattgctcatcagtgttagtggaactaagatttaaacccatgcagtcactgccaggactaggataaagtaagagaggtgctcagggtacaaaatttaagcgagaatttcctcttaatcttgtgcaagtatagaatactcacccaagaatgaatgtttccttaaattgcaccctcatcctgggcttgcaagcaacctagatttgtagcctaggtacttaatccttatacatcccgcctgctttatcctcaccctcatggatcagagtcagcctttagttgcattgaacagactgagagagggtgtgcaggcatggaagagaccagcagagacacgagtccaaagcaggtgtctttccttactcttagctgggtattctcctgtgccctccctcttctttacactatatttccatccttctccagtacagaaaggaaaaaaatactcttcacttgagaactaaatgtctgtatcccatagagaaatattagaatagcatctcagagcattgcgcatactcaggcctagctactccaaagagccttatttcttatcatcaagtccagacacaccctgaggttcgtggtggaatggatgatcatgcagtgtacatatcgataaggagtcacggggcttagaacagggccttgtgacaaggagtcaaactgcctcagagaaaagaaaaggtggaggacagtccaggatcccaggacatcagtgaagatatctatccctgcaaataccccatactctcaaaaatcttttatgtgctcagtaggttttgaatgggaataaacttttccagttagctgataaatgacaaaatagtcactatataattaaagaggtccttccactcagtcctgtacagcctgagctttaggaggccactgggattgtggactgataatgctggaactatctctggtacccttcagtaatggatcaactctccccttgactcagtgggacatggaagaaacacccatatgcccttatggacatgtgtggagagccagcaggagctatggccatggctggcatgaaggagagtaagtgttggtatctggtagcgtcactgaacttctcagcatcacaatggaaaattcctgctagtccttctggacaaacttttgacactgaaatctgagcagactggttgatgatggcttcctctctcttaggggcatcatgccagcagaaccctgtggggaggaccataccaaatgggcaagcccaacagtgctcagaagggcccctgggctgtgagggagcatcacttgcctctttgatcaggttcataaatctgggtccgaggcgccatggcttatgtctatggcactgcagggagctgacggtcagctgggatgcccggtgcgaggcaatggccaccatgtacacagcatcgtacatcagagccgcttcagtctgtggaggaaaacacacaccgcatcttaaattccacttttgcttaccttcctttacttgcataatcactctccctgcttccatagctcttatctgtctgatctcaaaggccatttactcttcagctaggtagttttcactctccaatagctatttttctccaaaataatacctcacactttggagtaaattgaagttataactctgcttcgtttcaagttctttaaaaaaaaataaagcaacccagatcagccacaaaagacttgattcaaggaacaaatattttgcgaagtgtcctccatgttaagcatggtgttaagatcaactaccttgagctagaagctactaaagctcaaagttgcaatatcagatttgtttctcagcatttgtctatatctatttatctatctacttactggtttatatttggtagaaagaaactgctacaatcactaacaggtgatttccagataaggatactggtgttggtcactttcatttagcagagttaagaagttcatagtcatggaatgaaactcaacggcaagttttgggagaccctctgaagggcagacaagtgcagcttgctcagaacatgcctcctcttgccagcatgtgctttcttgagagagattgaaacaagtcggtcattccttttagggggttgggcatctcgttcttcccttcctcatgaaattcctctcacttgcacaattttacataatacagcattttataaaatatgcttccctgtggtttcctttagggataaaatcttataatacccttgcatttcacttgagggtttcattgcaacttcaaatacattagctcatttgaaattctcaacaagtcttcaaaataagcagaagagataaagctatttattatgtgagaaaactcacttcgaggtaggatatttgtggaggggcacacacatgcacacacacacacacacatgcacagccacacacacaccacatacacaatcatagtgagaaatcccagagatgtcactacttctgcttattatttctggagagtaatagggattatatacatagctaatcattttcagagttaaacctagaatctaggtcatagaatgaaaattatcatatggttttccaaaattggttgattcattcaacatatactatgcattgattgctcatgtcttggtggaggtagaaagtgaggacaggggttactatatctcacaattttatcagtctttgaggtcacggaatacctctactttgaatcattattattctgttcaatctttatcattgtattttccatctattcatggtcatggatctttatgtctgtatcttgttaagaatattggttttttgaaggcagaaactgctcaaatttaagttagctttggtgactaacatggttcctgacacagaaaagttgtttaaacatgttcactgacgaagttaatactactcaattccttaaaatgacatttatttttgtgagaactgtagaattgcaaggttttaagatatagttttaagaaaaagcatttcattcatgcttatgtaattgacatactgacgttggattggtggtggcagtaatttataatgcttaaaaatgttttgatcatttcagttcaggacttacactatccactttgtagatgagaaaactaaggctcatggaaattgaccggtataaggctactctgtaatcaatttcattgccagggtttgagcctgcacctgcctgattctagcacccatgatctttaccactttgctgtactaattctgtttaattggaggaaagtaagctactggcagattgagacttttggaaatgcagtcaacagcaatagctgacatttattgagcacttatgatatgtcgcatgctgttctaaatcccttgcaaacattaaattttcactataacctttattcttttacagataaagaaaaaagatgttaaatgggatccccaaactcatggggggacaggcaatattcaaacccacaaagttggtgctagagtatatgccgttaaccataaagctgtgctgcttctacaccaagttattggtctgatgatttaatagtcacaataatagttcaataaaggttaatattcactgataatttactatgtgccaggcactataagcattttacatatgtcatcttttttaattactgaaattaaacttttgaaataggtatacagacagggaaattgaggcttgtagagaggtagaataacttgcctaaaattttgtagacattaagggaaagagtgagaattctaattcgtgatgcaaactcagatttcacctcatgaccatagccacatgctacagtgacttggactgtttcttatcaataggatatacttttttgaaaattcgtatgtgttttcattaattcgctgaatgaccaatttgatagagaagtataaggactggaattctaataatctgacttttccataaacttagtttagaaaggatgggcattctttctcaaggcgggctccatattgggaaaggcaataaaatgattcaaaattataggtctaatttgtgcccttcaacccaaagaagaaaactatttgttcgaaaaaatatgctaccccttgaaatacaatgttttcttagatggagaaaatgtttacattaactatattatagcactaataaactaccactgattttcctccccctttcagttttgtgctcgaggcctgcttactgaatgactgtcatcattttaggtaataggtaatgtaatagaaactggcctgtgttcaaattttcttcttccaaatgtgtttctgttcacattttatgtatatctaaagcctggatgaaatcacattgctcaatgaccctaagaaaatctttttaccacaatctgaaccatgaaataagcacattgaaagcatacttctcctcagtacacaatgctttggttattacaatttgcagtaaagtattaactcactaggcttagggtactcagaccttgcacattccaaagagaagattggccccttgactggctcttgagagataacttttaactccttggaatatcccaataagagtgtcattgtattctttgggtcctgggcaatgtcagatagtttatgctaaaaacatgatttatgatgaatgcctatttttgctggcctaggtctctgggccatgctgtatcaatttgatctcccaaaaggctggttactaagtaactaaggccagctgtatgggagctccatgcctatgtgacccatcatcccaataaaaaacctggaccccaaggcttgggtgagcttccctggttggcaatactttctagttgtcatagatcattgctgaggattaagtgctgttcatgcaactctattgggagaggatacttggaagttcatgctttttctgtgtggactctctgtcactttttccttcgctgattttactctatcgtctgttgctataaatctgtcattgtgagtataacagcttttctgagttctgtgagtcctgctagcaagtcatcaaatctgaagatggtcttgaggactctgaacataagccagtcagatgccacctcatcttagagacaaggactgacgacactatatggccttagaaagtccccatacttagctgcctggatggtgtataattgttgttggaaaaagctggaggagattggggtgctgaagagagacctaatattcagagatcaaatgggttgatcacacagggtcatataggtcccagataagattccatcttgggctatatgtgcaagctaaggaatgtgtttcttggaaatacatggattctgccatgatatttcagaatatctcttgttctttctttcctttttttttttttagaaggagtcttgctcttattgcccaggctagagtgcagtggcacaatcttggctcactgcaacctctgcctccctggttcaagcgattctcctgcttcagcctcctgagtagctgggattacaggcgcctgccaccacgcccagctaatttttgtatttttagtagagacaaagtttcaccatgttggccaggctggtctcgaactcctgaccttgtgatctgcctggctcggcttcccaaagtgttgggattacaggtgtgagccaccgtgcccagcctcttgttcttttattgactacaaatgggcaaaacatcaggtatcatcaagtaaattcaattctatgtactagaggttttgcatatgtgatctaatttaatctgtagagtaacactgtaaggtgttattgtacagatttatggatgagcagacaaactaagagaggttaaatgacttgttcaggtcacttagttaggagacataaccaggacttaaccctaggctttcattatctcggaagattttgctttctgtactgaatccagctgcctgttttctttcatcgctggagtagcagtggatgtacaaagtgggaactctatgacgtcttccctgtgggtcatgattaagggaaatgtttacaggcaagagagcaggataaggctctgacgtaagtttatgttgtgagtggatatgaagaactggaaaggcagatgtcagatcaatgtttggttgttcccctgactcctgtgcagtgttgactcatacacaattttggtccactgagaaggacccatttgagaatgaaccattctgtattatcccagtctatccaaaagctgaaaggtcgaatcagcccaattgctgagaaaaatgtaaacattataaaagagaacaaagtagattttataaaaatcactccaaacttctgttaattctgtcaattaccacttcagttgataaaacactctttctttttctcaagatattttttaataacgagttttactgtttttcaactccgttgactcagtaacaattttcttagtaacttaattttaacctaatttttaaactaaatttttttctttaattaattctattgttcttaagtctggtgtcaagactttttggatataggcatgactgatttctctattttcaggtttgaatgttttgatataatcatatttttgaggatttttagtgtatgaaattctaggaaatgcttaatagttagaaatattagagagaaaaatagacaattgaatgggaaatcaaaacacatgcattttccttatgcttttttctaattcctatattcatccatgtatgtatgcaccacataccaatatgactataaacagctacagagaaattcaccttgaagaatagtggaatgaagcatatgatttcagagaattcaattctattatagtagtagcattatttaaatattaagagtggccagtctgtgactaattttaaaaaaacactattattttaaagtaatctctattttactaatcatgcacattcacatatatcttgtttataggaactctctgcacttttatgggactatttcaaggctgcctaaatatttttcatttaacatcttcagttttagtagaagcttaattcttatttatttagcacattaatttctttattaaatacatatttattgacggtgtacttcgcactgggccttttctagtgctggggagaaagcaaagcacaaaatcacaaagcctctttttcataaaagacacttttatgaagtgtctattcttgtagggaaggtactgaacaaacgaatcaaaatataacacgtcaggtcataagggctatgaagaaaacaaaaacaggtaagaagaaagagagaaaaaccagggagggggctactgtactagatggtgattcatggaggctctgtctggtgaagtggcattttgtagcctggataagtgagacttcaaggcagggggacagcaagtgcttgatgtgcaagaatgaatgaagggcagggtctgcgatgtggacccaatgaaactgaaaccaaaggactttttatctttaacgtagagaagaaagagtttaaatagaggcaacttgacagcaaagatttgttagctttgggcctgggtttggggtcataagtttgctctcttggcttagctattgatcaaacggaggtcctttcgtgcccttcaatgcccttcacctcccatgacacagtttccacattcccaaagtagccacatccaggagaaacagaaagaaaacagtcaagtgcaaagcagactctttggataaaaaaaggtaaatgttacgcttcacataatttcaaagttattatctgcatgactgttggatacaactcatactggggcctgcatcctatcactttttaaaaaattagtattgacacgacctgatatattcaatagttactctacccacttttgcagcaccttagtgagctaccctcttctgctctggtaaatccccactttcctttatatagttaattataataataactgtaagaacacagtctagaaacccctctcttagttgggatgacagtaaaaatcttcaggcagaccaggacctcttccatccactgggactcaaccttatcacacttcctgcccaggggattaccgttagctcaggacaccagctgctgccctgggatagcagcttcacctcacgctcggcctgattccacatgaattgcgtaggtctgtctcctttgttcaacgatcttcctcatttcagtcaatatgtacaaactgttttgtcagctcagtataattgaacacacagactttttttctttgtaaattaagccatacttgtgatgaatatttaatgtttggcataagtccacagtctgtgttaacatagcttcaaactgtaactcttttagtggtatataccaaacacaggtaaaaatgatttgagatctcatcctgtgattgaaacttcattggaaaagtgggcagaggatttcgaaccatatttgaactcattgaaattataaacccaagaggaagaagagaaaaaccgatctattagcgtgcttctccctctgtctctggtgttccctctccctttcagaaatataatatttccctggatattctctacttgctcctattcaaagaaatgtttcaaatcatcccagggctcatttgtaccaagatgctttccatcattatctctcagttcactttgaatattttaaaagttatttcaggtttgaaaaacagttagggagcctgaacatagaatcatccagaaccacttaattcattcatttagttcttcactttcatttgttcctcataagaaaaaggggaaaaaaatcccaagttctctgtgagatgttgggtaaattgcatcttaaaagcgagagtgcgtctcccgatgataggaatggataataaaatactatgccattttaaaatgctattacctgcctgcattccacaatatctttccccttagatggctcccatataggaagcattttaaaaaattatttcctgctattttcttcagcacccagggagcttcattagagaaatatagtgaaggtaggtgcatttgacaagagacaaatgatgttagggagaagctctctgatgaggcagttcgcaatgtatctgttcagcagagtatctctgacttgtcaggaggcaggtctggcatctgcttcaagagcgacatatggctggtgttaaacactgtcagttctgcagaggtgaacctatacgcatccaggacaggaagagctgaatacaccgactgtttgtaaatccgacatttttccacactggctttgcttgctgaaatgtggcagaagtgaggaacacaaatcggttctgcaaaactcacaggtaggttgttcctcctcttcccccaccagccaccttccccacagccacattcctagaataaaatgctcttcacttgtccttgcactggtttggctgataatggtgattactcttgtcaagttttttatctggggcaagtacatccaggaagctaaaagtagcagtttttgctagtagccagtcacagcctttcaaattacctaaaaagcaaactctttcttctctactgcaagtcaaggcacccactgtaacacttttctctaatattttaaagatacgtgagatcttaaccccgaaggcattcaaatattcttgcaaatgattttatttgaaaatgacttactgtcatcatgccatccaaaaggccagtctcgggcctgggtggggcctgcagtctctccatggaccacttctcaatgatggatgacacgtgagggttgtcaatgttaagcagccgaaacccggtcatgtttacgccactgtacctatagagttccagatccaaagcaaataagtcctgcatagtatcaaaaaggataacagtggaaaataattagaattttcattttttatacaaaagaatattaatgattgtagcaccaactaatacaatgataccttttatctgtggttttgtggttcatggtttcagttacctgcggtcaaccacagttggaacatgttaaatggaaaacttcagaaataagcaattcataattttaaaattgcacaccactctgagtagcatgaggaaatcttgagctgtcccatgctgtcctgcctgggacatgaattatttgtccagagtctccatactacagatgccacctgctcatcagtcagttaatagctgtctcagttatgaggtagagtatcgtggtatggaagtgctttgttaagtcacccttatacttcataatggttccagtctgcaagagtattgtgcctaatttatcaattaatctttatcctaggtttgtatatataggaaaaacataatctatatggggtttggcaccatactagatttcaggcatctattggaggtctcagaacatatacccattggataaaggggagctgctatagattaaaacaaaatggcagccgtaccacactatttcaataaaagaacatttttcccattgtttttcattaacatgctgccctaaaaattctagggcagtaatcagttttcattttcatctgttttatttttgcagtactgttagagtttagataagtcaagaggaggaatttggctgctgataattagtatgtccttgggcacaggatgtaacattctaaaaagctaagaattctgttcccagttcatagcctttggggtattttgaagaatatttatttccatttggttcaatgcttttattttacagatgaagaaactgaggttctgagtggtgatgtgatcagaacaagaatgaaccactggcagtacccactcttctccaccaaatcttgcaccccaggctgttccaggtcttgccacaaagtgaaatttgaaaactgcatatgcatttggcaggaaaatcactcctggccgaaaaaaaatcatctcctggcttgttgaaaagaactcatatctcatacaacgagggcatgaagaatgttcgctgaacataggctcagaataggtaccaaaggatgctcttcagaggacatactagagcacaaggttacatggatgcaagaacatcttaataagggaacccattcccttgcagacaatgtttcaggaaaaaaagttgaactcatcctggtgttttctattacagatgaggctgagtgtaaaccagaagtttctaaattgattcacatttaagacagggttatgtaataatttcaacttttttcttatatgaaaagactagatttaaaaatacatcattaaaatatatcacatttcagaagaaactcaactttcaagataacatttaacaggaaaaatacttccataaaagtttcttaacaatgcaaccgctttctgaaagtgcattgcaagacaggacattatcctgatgattacaggtactgaaaagcagcagcttcagaaacacttcgcaatttgcatttgcggaagatgcatacaaatttattcttttgatgaactctctctttcccaagatatatttggatgaggcagtagaactgtaagagcacagctctgtgctccgagatcagtatcagaaaagtgtacaatactgccttttaaagcattgcatatttttttccttaacactaagtaactatttttttctttaacttttattaatactcatgggcaagaatggtaagaatataaaagccaaccaggacagaatgcagataaaatcagaggaaaaggatgaaagaagcaaagttaaagaagaggacccaggcaaaaatgagtccggtagcacactcagtgaatagaaagacagttaagtccagtctcaggaggtaagacagaaactgccagaatacacatgaaccctcttagagattcatagtacatagatttaacatgctaaaatgacatacattaaacatgtgcaaaattaggttgtcctacaatttagggtttccacgcaacaaagaatgtcagaagtctaaaatccgatttgctacatccccttgtgcatgcagaatgagtgttaggggtgaagaggaataaaagtgcacatttattcatcctctatggtctcctagccttggtaggttccattattcgtattccttctcaaatttctcccacaccagctcttccagggtgttcacagctggaggaggtagaaagttccgaggcagatggccatgtcaccttgagtaaccctcaggtgttcttcgtgatgggaagaaccatatttgtaagcagagtaagacactttgcagttctcaagttttccctcagctgttctcaaggatgacatgatcaagaaacagtaagaggcaaatgggaagactatgcaaaccttagttcaggaatttctaccctgtacccacttccaccctatgggaagactatgcaaaccttagttcaggaatttctaccctgtacccacttccaccctatgctcagtagcagtaatgattttgacaactgtcccaaagcattcatttcatgatgtcctctgcactctcaaagacatttgagtcagaaatagaatttactacttcgggtccttattctaaattctttgaattcccctactcactagcttgtcagctgaatttgctaaaatggcactgttactgacccccccagaatccaggtcaaatttagctaatatactcttacagattagaaaacgagcttgattctgtttttcttctcatgtaaggaagtggaatgtgtgagtgtgtaggtggggaggtgggggctgtcactgatttctgaaattgactgaatgaaaattatcacatcattttgatgtgttaaataccctaaatcattctccatgatcagatagtctctcaaaatttaagatgtcctatggtttcttttagatttctaaggcttaggaccatgatttttcttaatgaggcaaaatgttcaatgtgcagagcatctccaaaactcccctttctgaaggtttttcagacatctgacaggtaacccctggctaacccagctatctactggacacaggcagcaaagccacatcaaatcaatgaatgccagacacacttggatacaccttctaatgtatataaaaattgtagatgatgttttttatgaatagtttttactttaatagtttctatttaatggaattttcattttaatccctctctgaatgcacatgcattgatactagttaaaagaaaaagaaagaaggaaagaaagaaagaaagagaaagaaagaaagaaaaaaagcctgctgctcagcattgctggatttagaggattcttaggaaagtaaggcaagtctccatgacaatatcctgcctttgacactggtgaggccgactctgaaataactgtgtgaagacgtttcctaccatgtggaatacatttctcccagatgcacttaccagggttgtgaaaaagtagtgatagtactcggtcatcatgcccatgaacagaatctgcaaaagagaaataaggggaaagaatcaggaacagaattataataagaatgggataatttctagggtgactgcaaatgcttggaaacatagaacaggaagggactttggaaatccacaaactcagcagatcagaaacctgaggccaatgagtggctggtgtggagcaagccaactgacctccagccaacactatttccattacacactgcttgacctacatcgaagtaatgggtttgatgatcaaatttaaaaatagtttgggccaggtgcagtggcacaagcctttaatcccagcactttgggagaccgaggcaggtggatcacatgaggtcaggagttcgagaccagcctgaccatcatagagaaatcctgtctctactaaaaatacaaaattagctgggcgtgatggcgcatgcctgtaatcccagctactcgggaggctgaggcgggagaatcgcttgaacctgggaggcggaggttgcagtgagcccagactgtaccattgcactccagcctgggcaacaagagggaaactccgtctcaaaaaaaaaaaaatagtttgtactaaacaaattttgtatttggagttgtccataatgcacagggttttgtctttcccactgcctaagtgtctgagccatctcatacttagaaatatgtatttcattgatctccctacttacgacttagcataatgccaccctcattatgagtagaactcattaaatgttgaattgtcaatactggtatgtagatatgtttaaatgaaggtttatgaatgagtatatctctgaaacctttctctctcccccttttccatgagaaggggaagagaggattcatttacagataaaaggatagggactattctgacaccaatttcacactgtttcttcatgctggttctcaaataactacttgggatcgtaatagttccggacattctgtgagcgtgtatattgtttttacttcgtggaagaaggaaaaaaggaggtggataggaaggacaggggttctacgttcattgaactgtgatcttacttttggagtcccggaaatggtgtcaactgagaagaagatgcaaatggtttggagacaattctttctaaatatgaataaggatattcctttccttgggatagattaccaaaataactatttgggtgctttttttatttttattttttttgtctttgcatagaaatgaagagagaaggccgggtgcggtggctcacgcctgtaatccagcactttgggaggatgaggcgggcggatcatgaggtcaggagatagagaccatcctggttaacacggtgaaaccccgtctctactaaaaatacacaaaattagccaggcgtggtggcgggtgcctgtaatcccagctactcaggaggctgaggcaggagaacggcgtgaacccgggggcggagcttacagtgagccaagatcgcgccactgcactccagcctgggggccagagcgagactcaaaaaaaaaaaaaaaaaaaaaaaaaaaaaaaaaaagaaatgaagagagaagacttagaaatcacatttccaaggtagttttccgcacaactctggtcaattctggatgcaagtaaaaattccctctggaagtttttatatcaaagactcttagacaccatcacagggacatcctgaattgggatttctgagagtgtagccttgatttctgcatttcacagctgtgtctgaaaatcactgctctatggaaaacatgtacctttgcattaaataacaaagactttcagatcttcagttgaagagatggattgaaaaggtctggggaaagacattgcaagttatcagcggttctggaaggtgcctaagatatgtgaactagaatgattttacgtgaaagggaataagaaataaagagggtattagatgacagcacataactgcatgaacaccagtcctacacttctcaacaacgtctctactaacacgaaaaccagaggaatatttagtgaaattgcaatgtcatgaacttaagacaaatgacaggaaactccatgaatcatcagcccacaggatataagtcactcctacggtgacaacaagaccaggcacactaaaggatgttttttttcaagggtagacttgctttagtgccatcaataacatttaaggccatgcatggtgaggtcttgttagctgttctcttatatcattcgagcataaagagctggcctgccagggtcagtcagaaatcctatttttcactttggtcattagatagtgtaattgcagccaagattacctcttgaaagggaactgggcaggtttcatgtgaggatatagggctgaatgctaaggtttaaaattttgtttctgaaactgaaaatagaacacaaaggcatttgagtttatagcttttcacttgggtaaaatttttctttttaaatttcattatggaggctttggatcccctgttaagagataagcatttttttaaacaaccatttaactgattatttttattattgtattttaaaattcctggaggtaaatattcatttgacatgcctctcagcgttaggaaagagatattaaaatgcagcgaataaacagccaacaggacagctgttattgcaaaaagaaccctggggtcctccaggtacacattttatttgctgtagtagaaaaattcccgttccttttcctagctaattgcttgcattagtgcctcctggttcttcccttgaatttactagaaatggaaattaagaaacgagtccagtcattgatcattggcctgtcaactttgtggacactcacccaggtgaatgaaaaacatcttgataagaacaacaaagtcaacagcaccaaaggcggtgcttttaaagcagttgttcttgtgatggtctttaagcagctgagaccagtagccctgtcgtctaattgtcgcatactttgtaaataaaacgattgcattcccattttgattttctctctgcatgttggtatttcaactaaaagtcattaagggattaagaaaatgtcacatcaaaataaatgtcagttttaaaaataaaaagtgtaatcacgatatagggagttttctaatagttctttgcagaacttactttttcctgagaatgactttgaattttgatacagtacttgtctgccgaactgaccaaatggtgctgacctaggcagtatgtatactttattagggcggtattgctaggaaccatctctggctttacttaattgtcacaattaatttttttttttggcagaaaacacttcatgtcacacacactaaaatgtaataaaggcagatatcaatactgttcatatggatagcatattcctccgaattgcttccactaatatgttcttctaataaggcccatttcttttttttatttttatttatttttgaaagagtctcattctgtcgccccaggctatagcgcactggtacaatctcggctccctgcaacctctgcctcctgagttcaagcgattctcttgtctcagcctcctgagtagctgggattacaggcacgtaccgccatgcctggctaatttttatatttttagtagagatggggttttaccatgttggccacgctggttcaaactcctgacctcaagtgatcctcctgtcttggtctccctaagtgctgggatcacaggcgtgagccactgcacctggccaagtctcatttcttaatggaattaatcttgttaaacaacttttgacattatatcattgacttagattgacagttaaaaacaacccagcccttttgttaacattatgtatctaaaataggcagggtgtggaatatctattgattttggaagattactagtgtggacgtcattagtactgtttttccagttttccaactcaaagggtacatactaggattgcatttcctagtcccttgggcttgggtgggggtatgtgctggttctagccaatgaagtggaggtgattctgacatatgtcactctccagagatctcagttccctaatatcactagcattgttatcagtgccagaacaagctgttcatttttgaataaatacatttttctgttacatgaatactgcaagtcatgtaaatgatcttgtttacaactttgttttgattgctaggaggtttagggtcaaaattacgggtcttccattggcaattagtcaggagcacagggcatacatttttcatgtgctaatgtcatccagctttatgtttttgttatctagttttctcctttgtgccaattcccctcccttttaaaaacatttattagtttgtttcaaatatatttttccaggcagctccaattctttatagaataaagatattacaaataaacaaataatcatgattgggacaagtcaaataatttttccccatataaacgagtggaattcttcagatctgatgtagctgagttgggttagagtaatgaaaaaaagtttccaacaaaacagttttccccccctacctctaatgatcaccattgttagttaattctaatctacattgttacagaattaattataagaactcaaaagacatcaataccaaaagacttaagctcctgcatacttatgaaattccattccatctagataacataatccttaaatcagcagcgggggagtgtcttgtacctattgtaaatgctttctccgtatcatgctactgtacatggaaatgccacaagactattccattgttccagtagctaaaaaataattactgctttattttatttgcagtaaatgggtcatcagaaggcagaataaaaactcaatgccggccaggcgcggtggctcacgcttgtaatcccagcactttgggaggccgagttggacggatcacctgaggtcgggagttcaagatcagcctgaccaacaaggagaaaccccgtctctactaaaaatacaaaaaattagtcggcagtggtggtgcgtgcctgtaatcccagctactcgggaggctgaggcaggagaatcacttgaacctggtaggcggagattgtggtgagccgagatcaggccattgcactccagcctgggcaacaagagtgaaactctgtttcaaaacaaaacaaaacaaaaaaaacccaacaacaacaacaacaaaaaaccctcactgccagctgcctcttgaaaggacaattctaaggccctactgttaactgttatcaatatatcctgggacacagtcattgctcattgacagcagtgatcccacattggtccagctgctttctggagtttttgccacagaacactcatgaccttgttcacagtagtattgaccttcttagtctagcctagttgttcttggcaatgatgatctcttagatcttgatgggtgaagttatcatgtacggcctgagcagcaccaaggccatattttagtttgtcttgtgagtcctcaatgaagtctaggtaaagatgaccaggacgtagctcataggggtctaatggctgtggttgttgacagagtcattctacaaaatacagggaaagtctttggctcagaatcttccaaccacacatggagttatcttaagaagcctggaccatatttcagtctgatcatttcctggaaggcaatgcagagctatggagacagcaatgaaaaattcctctccacaaattctcagcaaccatcactaagggaaatccatatgccacacataattggtctgctgctactattgtggtaacagaaactcaaaatggaacctggagtgctactgagcaactttgaggtgttcttgtaatatttatatggttttttattactgctttttttccattgaaaaataggtatcttggaagtttatactgactaagccgaagtgtatttctctttttatagcctttctcaatatcaggataaattctaaaccaccagacatggtttgtaatcaataatttcaagtgaataacttccaaatgtgtgaacatgcaatgtggctaaaataatggttttacctcaagatagaaataaggtatttttggcacaggagtcttcagaaaaccaggtgaatgatatcaagtctccgagcagcaattttaagatgaaagtttgagcttcagtgtgtagctcttttttatttgctaactgtaatattttaggctgcatctatactatcctctgagccagatgcctctttggccatgcaatttttaatggtggtcatcagtagaacaagatggatataagacagtctttagaccagtgtttattgctatagaaagtacattcatgccacattgaatgattatagcttacatctacaaaagtaatagtggaatatacagaaaatagcatttgacaccagaaaaatcctgatatacagaaagatatccatctacttatggaggggaccaaataatggttctctaaagatgtctacgtcctaattccagaaccaatggaatatgttcctttacctggagatggattttacagatgtgaataaatgaaagattttgagatggggagatttctctgaattatctaggtaggcccaatgtagtcacaatgaaaacagcagggtcttaaggcagagaaggtgtaaatgggaatgcgtaaatagaaggagagagaaagatggagtgtgatgcggggccacaagacaaggaatgaggacggcctctgtgagtaagaaaaggcaagaagttggattttccccagaagtttccaaaaggaaagcagacctgctaacaacatgattttagatctctgatttctgtaactgtaaacaaatatattgttaaagccactaaatttggcttaaacagcaatagaaaaccaatacatctcattttctcatctttctgtgattatggcatatgaaatcgctgtaaccctaactccagtgattggtacattactccagctttggtaacgtcaaaaacatgtatcaagaggaaaaattgacttttttcatttgaggttgacaacttgctaagttcctctgtttccctccattcacttacacgtgttaaccacatgcatgtacacaggtgataagctaaccacaagtctagggtttttccttggatttgaaaactgtgctatatgatgtataaatccagcccctttttctcctacctccaagttaaactaaagaaaagcaaaagatattccacaaagagttgatgaattaaataactgtactatttggaagttcttctcagtgttaactcctttataagcttctctccttagaggtatggtctgcaggagaaaggaagctcatactaatagatattaataaaaggagtgcaaatcattggggtttagtttagcttggaagatgatcctactagaagagccagattgcatcacccaggtgcacaacagatgagattatgctatttaaggagtgcagactgttgagaacagagcaggaaaagaagttttcccatggcagaatgaaataggcaatctggtaaacaggagagaatggaacttttggggcaattacatgaaactaaaaaataacctctctgcaacatctagggaaaattggtggaaagatgatatgtaagagagaatacggaggaaacaaattttaacagcaaattattgaacaaaatctagaagctggaaggtaacagaatattttgaattattatctaccccagatgattcagtgtaatctttttgcaacaagcttctttgataatgatgttaatgaaaactatacctcaaatttgcttgaaagtcaccttttgaaggagagacaggggtgcagccattaaatggtgatcttgctggtctcacgagatctctattgcccagtaaagtcttcatgagtctggggcctgatcttcagctttttgggtgacttgactttgttaatttatctgaaaactatcaggcttaaaaaataatttatatcagtgtttcttagtatattattagaaccaccaagaaacttctccaaaataccaatgcctgagcctcattcctaaatattctgatttattttgtctgggatatgtttcaggcattgatagttactaaaaactccccaggtgatacttatgtacagccagtgctgagaaccactgatttatattaaccaagctcatatttttaagctacaacaataatattcacagcgactgcttgctgagtgccacaacacgatgttcactacagtaataggttattgacatttaattggagaggaagtgttattcctaatttatagattttagagataaagcatagttatagtatttgaacccaggtttgatttcaatcttgggatcttaggactttattaatttcttaattgataataggaggtgcaagtggcaggaaaattaataatttgcacaaaattctgctggagtttgagatcccaaataaaagcatatggttatttaagaccaaagttagaaccacaggagtcaaagctttatcttaagtaggatgcatcaatccacctgccagagtttgttaagtttcctgtctacccgtgagggagcctcctgtataaatgctggactcagctgtgaaaggcccttggatgatgttccagggactaggaggtgcttaactcacagttcttcttctgtaagaattcagacctaccttgatctcctattatgacatccctggagatattagaattaattagatacagcttttcttgtgattttgaatccctttaggtcacatttggaaagaactttaatctccttaatggagtaagaaaggatagtttctaaaatttgtaacagattttttttggctaaaagggtatattagacataatagatatttttgcaatacatgttataatgacagtggggacagatgtggagagctctgcatggcctgctaagaaatgtgtcctttattcttaatgcaacatccagggtggagagggtggcactcagcaatttcaaacatggaggtataaaatcagatgttttactcagaatgaatagtgttttagactatgcagaggatggttaggaaataggaggggaaaggaacttgtggcagagagatcaattatattagtggagaaggaagatgatgagagatagagaaaaggagattgaatctgaaacatattccgagggcagaatctccactgtttgctaactaatgaatgtgaaaggtgagagcaagtaaggtggatttcttggtttctggctgcagtaattggatgaaatttctagttaccaagaaagggacagagcaggagaaactggttggttgggggaagaacaaagaggatgcaaagtgttaattctagcatggaaatgtaattacattaggtgagatctcagggagacttggtatgttaggctgagaggaatcttggaaatcattgttatgatgtagagcagggagtgatgtcgtgatacagagttggaattgggaagccagttctaagaattgtatcacacctgtagttttgcctacacaaaagactactgctactaatgacaatgataatctctaagtggaatattttatatattggtgctgagcttaatgccttatatttaatacattgtcacatttaaattttctcaaataatgtgacatatgtactaatacattccctttttagagaagtggaaaataatgaatcacctgaaccttcactaaataatgatctcgtctaacacattagagtttttaatgatattgtaattcccatttcaccctagaagattctttggcacatagaactctacgggccaaaaaaaaaaatctggcacataatttggctggataaatgatgaaagttacatttcataggattacccttatagcagagaggatttggctaacagtcatgggaaaagtaggaaggaaggatccttttgataagatcttgcatttatgaagtattgaggaagtagataaggttaacctagcaaagtaatttttaaaccactttagtatgcaggcttctttagaaaatctgacggacactacaaacccctttccacaaaaaaggcacacccaagagcatgcaccttcctacaattttgaataaagctgaagtttgttgatccaataggcttaagatgtgccctgacatacatatcttcaaatacttttaacagtttcttctaaagttcccctgcttccactgcaaggaaaatttttcttatctcctactatagtcaaaagttgatataaccgggattaagcattagagcatttttgaagcatatgcatatatggtttttctcgcttcccaattcaggttgaagcaaatctaagtcctttcttaaactgactttttggaggcctttgagaatcctcaaatggatatcctggacactaagaatatgggcaaattgcacacacctttagtaaattgttggttatccacaaaggtcaattaattcttgtatacatttaataatatactcgtaactatgaaccgctccgtacaactaaaactaactatgtgttcagggaatataaatagattttaatatcagcctgagagaaacataattacgatgagaatgtaccgccaaagtaattatataacatactacaaattatcatcaaattagtataaattgagattcatcatcattacattgtcaggatttatccaaagtaatgaacttatcaattaactggctcaaagactatcaaaggactggagaaactttaagaaagaatgaactgcttaattaatttcccatttctttgaaagcctactaagtacaagcaagttctttatatctaaacgctagtaagaggattcttggtcacgtgtatgcatggaagctcagagctgatggaaatattagcaagctttgataattttgtttacagatgaggtgactgagttgaagaggcatcaacagaatttctcaaagttgcctgtttacaggatgtgagcaacatgggtgatgtgaacatcatactctgatctgaaattccagacctgtcactgagtgtgtgacctgaagcctcattttcctcatctatgacaaagactattttgagaggataaaaagaaatcattccagtcaaacacgtagcatattatgcatgcagtaaataccagataaatggtagttatttttttctgttagggaaaaagcagaatttgcaaatgggtctcccaactttcagtctaagattctaatcacagtccctcactggcaggaacatacctatataaaaaacctgcacatgtacccctgaactgaaaacaaaagtgaaaaataaataaataagccaggcttggtggctcacgcctgtaatcccagcactttgggaggccaaggcaggcggatcacctgaggtcgggagtttgagaccagcctgaccaacatagagaaaccccatctctactaaaaatacaacattagctgggcgttgtggtgcatgcttgtaatctcagttgcttgggaggctgaggcaggagaatcgcttgaacctgggaggtggaggttgcagtgagccgagatcatgccattgcactccagcctgggcaacaagagcaaaactctgtctcaaataaaataataaataaataaagtttattaattaaaaaaagaaagtaacttgatggtattaggccaatttgcaagcactggataattttacacttgttacattcattttcaaggtctctttttgccttaatcgggcagagatttgggtttttattcttgttgttgcttccactgttgtatctccaacaccttcaatcagtgctcaacaaataagtattgaataaaaaaataaatttctctatgatatccctaccacattctctactgggccattggacatttgatacaattcacatttcttaaggaattgtgtaaagctagacatgattagatgtttgagaataaaatgaaacaccttcgttcaagaagtgcaaggcttaactaaaatacgtttcaggttgcaataagacgagaatcagttgacatcttgttgtacacaacagtagcagaagaggttacattttttttcctttcaaagcctcagataagttttaaatcccagacctgccacttgctagctttgtgaccttgggcaagttacaaaatctctctgggctctgtcagtttcttctatccagaatgttctcataaaaattaaatgactgatgcatttaagctgcttagcacagtgccagcatacggtacgtgttcagtataaaatggcccctgaggtcttcggccttttctatgtatttatgatgaaaaaaatgattgacttatagatctgacttagtgggcacatgtttaccatcccttagcatagtgtgccatgcttgacttgatgttttctatagtgagagatcacagctgatggttgcttctgtcttatctaaacaagggatgaaaccaatttaagcatctctgtttgccatcattacagccactgagcacaacatatatgaggagagaatcaatgcacaaaattatttgattaactagcattgtcattgcactttctagcagaggaagaccaggcattaaacaaacaaacaaaaagccattttcttctttgccttgtttttatgttaattgaaagagatttaaaaaaaaagtgggttgggggtggagaaaaaagcaaaagcatgcaaatgttgacaggagaaaatgcaatatagctgtacaaactattttggtgctaaatgttttatgcagactaatggctcaattatagctaaatattcattgccactagtgttgtgggagaaaaaatctccctcaatttgttcatgtaaaggagagggcaggttttctgagtgggaaacagcatgttcatgctcacctgctggccattctccagctcaggaaattggcccagcccccagggagcttcccattgaatggagcaagacagtgccatcttgcttttcatcagagaaccattaggaatgggtgcctgaaatagcgatttgctcactcaatcctactatagatttaaaagtgactaggcagttctccaaagagccaaatttattttcaggaagtgaaatcacaggctcaaatgcattacggtttcttaatagtataggatttcatagttgaacaaagcctttctttcaggtaacaggcacggaggagcaactcacccaaatgtgcttggcagagatgagagtatagcagactcagtggggtagaagaaaatatgactttggggatgatttactgaaagaatctagaacagttcttggctcattcattcgtttggttcatttattcattcaacagagctgtactgaacactcgttgtgtgtcaaatgtagtaggtgctagggatttgggggaaaaggacaaagaaggcttctgtcctcttggaacttacagtgtagtaaaggatatggacaacacatgagtaaatgtcttaattcactatgatttttattgtggtgatagagcaaactaagtagagtgaagggatatagagaatgagaagggagcttcctctcttttatctcttaagagatattcatgaagacttaggtgggaatgactgggaatttagaatgttccaggatttggcaaccgcaagtgcaaaggctatgatgtggggagaaaaggctgtgtcacgtggccagaaaggatgcctctgaaatggagcatcggatactggaggccagcaagaggagaaagaggccaggtcaggtcatgcggccttggtgttttctatttaagtgtatgctcagtatatggtagataaaattggcttcaattttcaattgcaaaagaggaataatgccaatcatattaaaagttatttggtcacttaaatgagatggttgcttagcacccagcatcctgctaggtacaagttgagaattccataggtagagctttcttgccctttgcttcattctttaaattcacctcctttcagccactccctcagtaaaatcacactcagtatgaatgagggtgtatatgaaggataaacagcgaagagtcggcgaaagagtagttggacttggggaaatgagagtgaggaggagcaatggtttccacattgaaggcaggttaaggagagagcagcatcttttcaaagcatcaggaccctgctgcgaggtggtgggtgggtaagttggggagaggacacatgcgaccttctggtttatggaaattttccaactgtagaaattcatgaagaaagttcatatgaaagccctatcttctgtagcctaatcaagtcttgacattcaaatttcaaatgaattttggggaaataacttctcagattttcatcatatagtacttgttcaatatgaatagaaataattactttgctggagtaattagcatgcccaagaataactatagacttttccccaatttttgcttttagataaatgttaaatatctttaaagtgcctttgatttcttcttttctgaagaatcattaaaaggtgagaaaatatgataaaggtgcagggaaatgcaggacaatgatggaaaacgcacataaagagggtaccacattgacctggcagagaaatgttcttggcagtgatttcagctaccagaaaagtaaaagctattaatactgatcttatctaaagaagaccagcagcatatggctgtgttttttccagacatttctgaaagcctacttcagaatagtcatccattctgcttgggggcccttcagagtaaagtgagcacacaggctctgagatcaggcagtctggagaccacatggcagcctagccaggctcagagaatgaccttatatgggtcacttatcctgtctgagcgtcagttgcctcacctcgaaagtgagaataagaaactcacctcagggggttgtttgagattgatgctatgatcatgtaggatgccacacacctttgttggcacctcttaggaccctcagtaaaagaggtaagtctccttcctttcctttccttgggtagaaggattagtggaatggcagccagaatcaggacccagaactcctgagtcctcagcctccctagggaatctcttagcagacaagtctctttctacagttttttctccagggcaaatggagcaagttaagctggatcacatagagtgcttgggccttactttgaccagaacagaaaagttctgatgtctccaatatcccgtttcaagcacagcagcctctggaggttccaatgaagccccattaagctgacctgagtcctctgtagttattccaaaaagcgcaattgcccttttacatgcaatacggtaggaatttcatgataggacctttaaaaaagggttcttatctccaaaatatttgcagattattagtctagaacgaaaactggataagccatctctttagtgtcttcctccaagcctcacagccactcttaacactaaaatgattaggaaaagcaaacataggccaaaacatgataagagagaggatagagagaaaaatgtctgtgtcagtggttggtacaaagctgaactaatcctactccccgctgtaccagctagacatttcttgagagtgccattcttggatattttgcttttgtttttgttttaattgtcctttgaatgatgtaatccccaggctactaggaaagagctacttctatcaaaggaacttcaagtccaaatttagtgaaatagaagagaaaatctagcagcccttccctgccgccaccatacactgttcttgcctattccagacctgcctttgggagagatgtggccagttatgtgagacaaatgagtatctagcaaagagaagtctcatcagcaaatcattctcttaaatgtaacagaagtcctcagcctctgttacaacaggcccctgggaagggatgcttctttgccttttgagggctacacataaatctgggtgtttttctcagttctgacccacacacttcattacaccctttaatgaactgtattaacattcttaaatgaagccttatgataaaggattactgattgcatttacttacctttaaagttcttcagttgttgacactactgccacatgcttacttgctttattgagaggaaattttaatatctaaagatttgttaatgtaactataacgtagaattaagcaatggatactcttctgcctagcaggagtgacagcatctcatggtggagaaagcactggatgtatgactctggcaatatcattttatatcttgcaaagtgtgagaattagatatggtgatgtctgtgattgctttcaaatgcaactttgtgttcccaactttattttattttattttattattttttggggacagagtctcactctgttgcccaggctggagtacagtggcataatcttggctcgctgcaacctccacctcccaggttcaagtgattctcctgcctcagcctcccatgtagctgggattacaggtgcccaccaccacacctggctaatttttttgtatttttagtagagacagggtttcaccatgttggccaggctggtctcgaactcctgacctcaagtgatcctcccaccttaacctcccaactccaactttaaatagaatttttttttttttttttactctaatcatccagcacataatagaaacatttggtcaacttttttgactgctgatgttcagtgcaagtaaaaactcaattctgaactcaatggctgcatggaggtgctctgcaagtgtgagatggagcaccagagagtcaggccagatgattatttgaagagagctcttcctagtgattcaaaattccacagttctgcattcctgcgaaggggtttatctacttatgaaattactggcccttaccaatcaacaacatagcaaccccagacctttaaacaaaggagtgcaatacagcttgtgttattttagataaaaactttgcctatgccacaataatgacttaaatataaagagatggccggcagaccacataaatataacctggatattttttctttctcccaaattcaatcatctgatcttttattaatgcttctattttaaacgtctcactagcctttccagatgtgtattacaagatgtttagcagtacccactagttgccagtagagtgccctgttccaaatatgaccccccaaaatgtcttcagacattgctctaagtttccagagggcaaaatcactctggggtgagaagcaccagtctgcgctttgtttctaattctgaatttacttttttttttttttttttgagatgaagttttgctcttatggcccaggctggagtgcaatggtgtgatctcgtctcactgcaacctctgcctcctgggttcaagcgattctcctgcctcagcctcttgagtagctggtattacaggcatgcaccaccatgcccggctaatttcatatttttagtagagatggggtttctccatgttggtcaggctggtctcaaactcctaacctcaggtgatcctgcctgccttggcttcccaatgaatttactttcttaaacttaagaccaagtgctcagaaattattattctgttgttattattctttttttttgaacattactcatgtcttcatttatataggatttcacaatttaccaaatatttctatccacattatctgtggagactaacacatagcagtttattgtctagaacaaattagaagaaagaggcatcttttctgtaactgtccctgtataccttttttattgtgtttgcaatcctgcatgtttgacaaaaaggtcttgccatgaggaagatgtatttaggacaagtcaggcattgtggaaatgaaatctggcacagtcttttcaagagacataagagagagagagagagagatgtttaatcacctcaaaatgatgtccttctctcatcttcagctggtaggagtcacataccactcggtccacccatagaaacacacatttacaactaaacactcacattatggcttcaatgaagccccatgaactctctgagccccttgcctgtttaaaagggctctgaaaattataatctttagcataaacgggactgctgcagttttattatgctgcattaagtgaaaactagatggcatttttgaaaaatagaaaataacatttatcccacacctccacctcctccctagccctcttacctgcttaaggatttcagcggctgtttcatgtgaacaatcaaatatcacatagaactccttgcctttcttcatctccttgagtaaaggcttggcatctttattcccagagggcagctggcggattttgattttaatattatatctggagggagctttgatgagctcttgtagacgaattagacctagaaaatgacatgcaatcatgcaatggagactgttctgtcgacagagtattgtttattgccatttagttaaactcgtttcaactccaaaacatacccagtggccaccttcctaaaggttacactcctgacttcccatttgtcactcatcttcctgtggtggattataccattttccctttgtgggtgtgtgtggcttggaagcataattttcccaggagcattttaaatttatttagaatgcaattgtcctttccagctttcagcaaacacctcccatctttaacaaatcaagcctgcaactgtaaaacttggtaaacaaaaagttggttgaagtttccaaaagtgttcgatgaaatagatcacacctgctcacttacaaagccgatagaatatggagatttgtctaggctataaacttctgtaagccttttattaagtatttatatataacatacccttaaccagctaattaattgggttgctttatataatctttcagttcatgccatataaactatttgtaaatggctcatgctcattacattttcttgctaatatatttgaatgttaacttggaaaatcctacttgattttttaaaaagaccatagaatttttagaaattaagatcataaaagcagaaacagaatttaaaaaaaaattccctattggttattgcaacaaaacatatacgtccaactaacttgatggagaatgtttgatttaccacaggtgtggatgtactgatctgcactgtttcctaatagacatgctttactaggacaaggaaagccgctgtgtaaaaggctccctcttatgttccctaatgttagcaggtgctcactacgctgcaccttggctctcactcaagaacttccatcatacggaaaaattgagtttttttttttgttgttttttttttttagtatgcagttctgtaccttcaggatttgtcagctttaggtaatcagtagggaatattaagtttcatgagtattcagatgaaaattgtgatatgctctgtgcaagattcagcatgtattccagctactgtcaaagtcacatttttctttttcttgttttatttatgtagctatttttttttttaccagaagttacatttgtgtgtgtgtgtgtgtgtgtgtgtggctcagatgaggaaaggtttctctaccaccatagttaggtttgattctgatgtacaataaatttataatgatattgaacttcagagttaaatgtgtaggagtagtagaatgggagggtggttgctgtagaaccttatcaagatttagtgctcattatctgatatggcttggctctgtgtccccactcaaatcttatcccgaattgtaatccccatgtgtcgggggggaacttggtgggaggtgattggatcatgagggcggatatcccccaggctgttcttgtggtagtgagtgaattctcatgagatctgatggtttaaaaaagtgtggcacttccccccttgctctctctctctcttctgccaacatgtatgacatttcttccttcctgtttaccttctgccatgattgtaaatttcctgaggcctccccagccatgtggaaatatgagtcaattaaacctcttttcgttataaattactcagtctcaggtagttccttatagctgtgtgaaaatggactaacacatgaatcttttctctttttacacaaagattgaattgctagaatagtaggcttcctggattcttgctccttttcaaatcagtcaactgaagtccctcaggtacttataatcacctgcttgtcttctcacttccacagccacgtcatgaactactgaggagcattaaaaatgaaacaaaatatagaacgtgggttcgtatatttgttatttgtaatatgtgttaatctttgaaataatcctatgatgtaaccattattactattattatttaaatgaggaattcagggcccagagtagttaagtaacttacaaagatagttaagaagaatcctggattaaaattgctgtttgtgaatccaacacttaatcttttgacgtcaccatcctgccttataaatacaaattgttggtgctgagggaacagatatggcttaggacttgttgatgagatggggaaaaaatagagactccaggctgcctgagtttctctcctgttttctgttaccacccacctgctttgcaatcacatagatttttttttttcatgaccatgaccacaagggacagtttaatgtggtctctaaataacattgggaaaacatttaaaaagtgcattttgtgtgcttcaatgaactgctctctttttctgtgttgaatagaatgtcacatctttctatcatgatgacttacatatttataggatttaaagttgacatatattttctcacttctttcatttatttttatgggaaaacatttgctggatgctcattagatgccaagcttcatgctaagccctggggatgcaagacaacacaacctgcttcaaagtcctcacagcctgtaggataattttgtcctgtcaactctcttgaggtagatgaggcatcaattaccacttaattttacagattatgagctaagactgctggaggctggagtaacttgctcaaggttatatagctaataagtggcagaacccgggattaaggccaaatccaccttctgataccaaatttagggctctttcctccaaatcagtggcccctcccaactttaggatttcttgtcaactggctgaatgaaaaactaattaactgactaattaactatattaatacatagctatataagtaacagagaaagaacatttctagaccagcacacaatattaaatccttatttggcacactaggccgttaataaacacacacccccaaatatgaccatcaacttttacagttgtttcataaaagaaggtatattttaataccaatagaggaaataggagaacaattcagtccaaaagactagtttctaattggaataaatttatcttttacaaaaagcttactgttaaactcctatttttctccttttgccagtatataggtaaactggcttcagaaagggggaggatcagcagatttaaagattagggatggaaactgggggaagaacaaagaacagggagggagtgagttttttatttctcttcctgaagcaattgtttgcttaagaaaagcctttctgccttcattagcaaatgatggagaatttacaattcaaaaagcacagtagacaaaatttagaggaagctttcccttatatttgcattttgcagcaatccatcagtcatttctttgtaatgagtagttaaaagtcgtttgctaaacatataattgcttcagaaaaaggacattgatttaggcacaacacctagctttgctaatcctctctcgtgtggatgccagccctgatggagtgacccaaccctgccagaaccccagttgcagtgaatggtgaaggtgcatgtaatgctgataacgtgaatttttttctagcccactgagatggagagaatttaaaaataaaacgtaggcaagagagaaccagacaaacccaatagagggacattcaacaataaaactgacctggactctttaaaaatgtcaatgtcatatatggcaaaagaaggctgaattgtctgaatcaaaggagatgaaagggatttgacaactgaatgccatgagtgatcctgggacaactagcaaacatatattattattttgccaataataatattagcaaatatatatttctatatgtttagataacattattacgttattgctaagtttcctgtacttgataatcttagtgtggttataacgagaaaggtccttcctaggaaattcatgctaatgtacttatggggaaaaaggtcaagatatctgcagcttactttcaaatggttcaacagtgctactacttagtataatttttattgttgtaggtgtttctatattaagagaatgatagagcattacagcaaatgaggccaaatgataataaatgatgaatctaggtgaagggtgtacaggagtttattgtacatgtcctgcaacttttctctaagttcaaatctttctaaataaaaagacaaaacatacagatataaaatcatatcataaaagcttcttccacttctatccccaagaatgaaattggaaatgcaactttggttgaataaacgctttacagaaagaaggctgttttttttcacatgaatttgagctaagctctgcatatagatacaactttcaaaaatatccaaatggccaattctaaacacttgctttggccgcctgtctactcggtgcactcagatgtgacacagaaaaaaatgctgatttgcatgcacattgggtaactcaggcaacaggtggagcatatggaggaggaaaaaaaaaaaacctctgctatttccagtgagcattgaagatttcctatgccttccttttaagtaataacaaactttgctatttagattgcccctttttatgaagtctgctccatgccttataaatagcgaaataaaccttagaatatacctctgaggtgaataggtgtcagtgctattttacagtgaggaaagggaggcatggtgaggttaattgtttggatcggccctgaaaatgggtcacaaatagcaggaattggaagagaccttcaggtcaaactccttttgatgcatgagtcccctctacacagccactgctgaacacctctcagtgtgagaaattctctaccttacaccgcagtccaatccattgctggatagctttagctatctttaatgagtctcggttcaaaagaaaagtacctaggttttcttgagtcttaatccaatttcctgtttgttaaaccatcagtgagtttgatgccataagcatgaatgttataaaccactgggacccaaagatcaggttgcaaattttaaatgttaatttcttctctatttgaacttggaaatatgcaaaatggcatttcataaacttgtgggtatattaatgtacccaaatctaatacgattcttaaggggatctgtgcatcctccagagcggaggaaaaatcaaaactaaaaaatgaaaacgggtatgtgagcgaattacctggggaaacacaatgcttttaaagtgcagatcttcatacatagcgtttttcagaagtgcaacagagaaggcaagtgggagtcttcccaaaagaaaaattgtgtaccttggttacaaaggagcttatagaagaatctagtctaagtattcaagaaagtgtattgcactcagctccaccagtatatgttggtgctgaattctcgttaagtttcaacagtagctaaaaagaatatgcctggcctggaatatctaaatattggtttcctgggcatagttctgaatatttaagtaaggttctggtcaaagaaccgaggtgggagatatgaagggtagaaaaaagtgagtacagagaaaaaaagaaactgtaatttatcattttttttgatattgagtgtaaagaatgttccatcgttgggttatttcagtggaatggtgggagagcacatagcagaagagttttagctatcacaagtggtcataatgacacagtggggtgagtggtgatgacagaaggtgaaaagagtcacttatttggcactgactgtgtatagcacatcttgcattttagcttgactactcatgccaaagtgttgattttctttgagtccaaacttcaggcttctgtcaagattcttagttctagaagagtatattatttctgttttctatgggaaaatggaaggaactatgacagatagagtttttaaaaactaagtcattacttaaatacagctataagagcagatatttcacttactcacaggctggttgagcacattaaatgagttaatcatctatttaggacagtgcacatagtcagcactcaagaatttagttattgttattattgcgattttcatttcatgtatgttttctcccagggttgattgtttttttcaatcactgccactgttagggatgctattctcatttcaaattaatccttacagtaaagctcggagactatatttgatgtgatgactaacaactaactcttcactgcaggctgcattttagaaatctcatggctgtgatgtgttgagaaaaatgacttaaggtaaacaaagataaacttctcaaggttgatgtgttataaattcagggctagaggcatctgtctggtgctcatttccttgatgtactcatcccgtcctatctataggctgaggccactcaaatttgtgtctccagcccagatccattttctagactctagactcaggtattaactgcctgttcttacccttattcagatgtctaatagatatctgaaactcaaacttaacatattaatgactcaatttctgatatcattcttatttcctcaaactagttccacctataacctgtttcaggtaatgacaactccatcctttggctcaggacaaaaagatcaatcttttatttctctcttctttctttcctaacctctactccctcaggatattattagcattttgagttaatttttgattctttgatctacaggtatgaattaaaccgtaacctgcctcaccaacaccatggcatcaatattttctcagactggaacacggtcttcctgtttttatcctccatttaaaaataaacttaacatatggcatttgtcttgtgtctaaggaatacaaagtgtttttcttgacatttgatttaattgaaacactgagccaaactttgatatttcagaggagtttgccataggagggaatatgctcgctatcttccaaacaggttaatatcttgaggcaacctgaggtgtcccaagtttcttaggtcattgagttccttaaatcaaaataagtgtcatacagacccaaaggttgtgctggatactcaaaaagacatcttaaagtagtagtgaaactaatagataaaatgcatgcagttgagaatatccatgatgatttttgtacagttccctcaaagaccctacaatgtttgagcaatcattcaaacatagcccaatgtcaccacacaaatggagataaaggaaagaggacatgatcatatataataaaaactttcaaatggggaacacattcaaatatcctctcagatattatgccagctctacattaaaaatgtttccagaacctgagcgtatcttactcttctactgtattgcctccatctcttccctgggtttctataggagccatctggcaggttgccatatttctacctttgcctctgtagagtgtacagtgattcttttactcctactattcttcaagagtaggccctccttatctgaggttttgctttccatggttttagcgaaccacggtcagtcgtggtgtaaaagtattacatggaaaattccagaaataaacaattcataagttttcaattgcatgcccttctgaatagcatgatgaagtcttgtaccatcctgctctgtccacatgggacgtgaatcatttcatcattgttgttgttagtctcttactgtgcctaacttataaattaaactttatcatggtattattcatacaagtgctatacagacaaatatagaagaagtgcttaggtatgtatatatagaaataaacatagcaggctgggcgtggtggctcatgcctgtaatcccagcactttgggaggccgaggcaggtggatcacgaggtcaggagttcgggaccagcctgaccgacatagtgaaacccagtctctaccaaaaatacaaaaattagccgggcgtggtagtgagtgcctgtaatcccagctactggggaggctgaagcagaataattgcttgaacacaggtggtggaggttgcagtgagccgagatcgcaccactgcactccagcctggatgacagagaaagactccgtctcaaaaataaagtaaaagaaaaaagtaaacatagtacatatagggttcagtactatccgtggtttcaggcatccactggaggtcttggaatgtatccccttaggatgagtagagactactgcagaatgttactctgatcttatccaccctctgctcaaaactcttccacggcttcccattccaggcagagcacaagctcttccaatggtttacaaagtcttgcatgacctacaaggccctcctctctgaccgtctcttctatctcccctcccctcttactctgatccatccaccctggcctccttgctgttgctctgaggtaccaggcacactctcacctgagacattagctgttctgtctgactagaaccgccttctctctcacagaacgtggttcacttcctcagctccttgcagcctttgctcaagcctcatctgtgcaatgtgacatgacctttaattctgcaaaccacatttctggcttccagattcccttcaatctgctctactttttctttcttccacagactcaccaccgttcaacaattataatcattttatattgaatgaaaaaatggtttattattcccatagaacctaagctccttgaagtcagtgggttctatctgttttattcactaatgtattccatatgcttagaacaatgcctggtaccaatatttattggcatatccaataaatatttgtggaatgacagactctgacagcattagtgaagatgaagaaacagatgatctaccagggtggcatcacgatgggacagtgcagtggcaatttgtgttttagaaaagcaatttatccaaagttgggagcaactttaggtgccagggtaacctcttgggtactacaggaatccttatatcaggacctgcctatgacagggttttccaagcctgggcttgaactcttctgggtcagggtgttaaatattttggagagaaatgcaattcatctcttgagagatctggtgattaaaagttcattctttcagtgatgctaaagttgcttccctcaatccttcacccactttgtccatgaaagcccagaggactagctaaagcttcttctattccatcaccctttagactcagtgttcagtagccattaacttctatgtccttatgtttttcttttgcagcctaaacattttagttcttttagacttactcatgtattctgtacatgaatgttctcaatatccacatatttataatgaagtaagggctggcgtcgttgtgaattttgggaggcgggcctatccataggtaaattttagaacaggaaagttcctatttgaagcaccctgttttcttttgcttacattttttttggtctaaatatttagcttaatggtgtctataataagaattcaaggtattatccttctccctactcaataaataatgctgagataacttgctagccatatgtagaagaataaaacaggacccctgtctttcactatatacaaacattaactcaagatgaattaaagatttaagtgtaagacctcaaactacaaaaattttggaagaaaacctaaggaataccagtctgtacattgtttttggtaaagaagtcatgactaagttctcaagagaaattgcaacaaaaacaaacattgacaagtgggacccaattaaactaaagagcttctgcacagcaagagaaattatcaacagagtaaacagacaacccacagaatgggagaaaatgtgtgcaaactatgcatccaacaaatgtctcatattcagaatctataaagaacttacatcaacaaacaaaaaaaaaccaaataaccccattaaaaagtgggcaaaagacgtgaacagacacttctcaaaagaagacacgcaagtggccaacgagcatatgaaaaaatgctcatcatgacagatcatcagagaaatgcagatgaaaactacaagacaccatctcacaccagtcacaatggctattattaaaaagtcaaaagacacagatgttggtgaggctgtggtgaaaagggaacacttatacactgttggtgggagtttaaattagttcagccactgtgggaagcagtttggagatttctcaaagaacctaaaacaggactgccatttggcccaggaatcccattactgggtatatatccaaaagaaaatcattcttccaaaaaacccacacactcatatgttcattacagcactattcacaatagcaaaggcatggaatcaacctagatgcccatcagtggtggattggataaagaaaatatggtacatacacaccacagaatactatgcagctataaaaaagaataagctcatgtcctttgcagcaacatggttgcagctggaggccgttatcctaagtgaattaacacaggaacagaaaaccaaatacccatgatcttacttataagtgaaagctaaacattgggtacacgtggacataaagatgggaagaacagacactggcgactactagaggagggaggcaagggctgaaaaagtacctattggtacctgtgctcactcactgcatgggtgacaggatcattcatactccaaacctcaacatcatgcaatatacccatgcaacgaccttcatatgtaccctttaatctaaaccaaaagttgaaattattaaatattgtcctttagctatttacatatgcaaagcctccatgatatgaaatacttaatgatggggttcagcacagtgctaccaggaaatagttattttgtcagggcctttgcactggctgttccctctgcctgatgtctgaaatgctctcccccaggtatctacatgatttgttttttatcctctttaaatttttactcaaacgttattttctagagcacttccctggtatccttacataaaactgtatacctcatctctactgtcggtctcccgaatactgtttgatgctttattttccttcataacattttctactgtctatctactaaatatttactatatattttgttcattagagaaacagactgtggattccatgaagtcagatatttttgtgtgtggtttatccccattacttaggataatgtctggcagtaaatgtctatgaaacaagggaatctatcatctctatctatctatctatctatctatctatctatctatctatctatcatctatctaccgtttatcatatatctatttagctgtcaactatattcactatttatcaactatctatctaattgatcatctacctatcatctatctaatctatcatctacttatttatatatctatctaatctatcatttacctatcagctattaggttggtgcaaaaataattgcagtttttgccactacttttaatagcaaaaacgcaattactttttttttttgagatggagtctttgctcagacgcccaggctggagtgcagtggtgcgatcttggcgcactgcaagctccgcctcctgggttcatgccattctcctgcctcagcctcccgagtagttgggactacaggcgcccgccaccacgccaggctaatttttttttgtatttttagtagagacgaggtttcaccgtgttagccaggatggtctcgatctcctgaccttgtgatccacctgccttggccttccaaagtgctgggattataggcgtgagccaccacacccggctgcaaaaacgcaattacttttgcaccaacctagtatctacctatcatgatctattttctatcatgtatctgtcctctattaatcattcatcatttatctacctattgtctatcatctacctatcatctgtctattaatatctatcatctacctatcatgatctattatctatctattatgtatgtatctatttatctatctacctacctgtttatctccttgtctgtctgcctgcctgcctgcctatctaatatctaaaataatatacactaagacactatctgtgataggttttctggatatttttgtttatgtccttacacttttcttcattttaacattttctaaacaaagcaatcttttttaaaaaactatataaaaataaaactttcaaacaacgtattgcagaagccatttagatctcaggaaaaggcagccatagtacagagtatgcaaatatgtgctgtcttgactattttccccaatatttcagaaaatatcacctgaaccaaatgaatataaactttgggccagtttagttaaggacaagttaaagtagagaagagagacaggcaaaactataaagtaggtttttcttaatcattcacaaaataaaagctaagcagaataggagttttttttgtttttttttaatgttttgccactgaaatttgaattagcacttgcttatttgctctctatgctgactgcgtaggtaatcgcctaaccaagcataagaaaacactttgaaatcccactctctgtggcatgcaatattcaatgcttttgttgtcttttaagagagccaaacctaaaatgtgctatgattagtttaaagtaagaaacagcattttaagtcattattagccattaacactgttggggctcagaacatgacaccccaaaatatggcaccttggcatgctgactactttgaactgaaaaagactggaaagttctcagaaacaaggtctttctgactttctcctgacccccggtatcctacccctcttaatccactgacgtgagtcatagaaagtagaatttcacttccctaagtggagcatagaagctagaactcctctccccaaaagcaagatataaaatctagaaagattctcttttcccttgaagactcttatttcataggggccctgacccatgctcaggaggaaggaacactgcacagagaggctaagaagaatccgaacacacaggccttgctgggctttccccctcagcctattaccactgattctacccttttgtccaatcacatttccacatgttgttcattcttcatggaatctaagcatagaaatagacagttttccctaggtctttggtcttcatttttgaagcctcctgagtcatgtaaaactttggttaaacaaatttgctatgattttctcttgttaacctgtcttttgttataggaatgtcagttgtgattgttatgatgggtgaggaaaggtatctgttcccccaacacttctttgaaaatttgtttatccaatgaaccagaatatcacctggcaaatcccacagagataatgagacaaaggactgacacgtattgatgaggaagccaggagggccagtgaggaggaaagaagggcatgaaaacccagaaaccaaaacgaaggagttttggatgtgagctgaacccacttcatatgtgtacaaaattacaatcttagtttttagctcagttgtcttatcttttaaggctatagcagaggtgaaatagggccaaaaggccaaacctagcccagcatgtatttttgcaaataaaggtttattggaacacactgggtccattcgtttacatattgtccgtgtgcttgcttgctactttgtcagagtggagtggttttgaccaagacccccatggccataaagcctcagcacttggctcttcacagaaaaagtttgctgatccctgctctccaggaatcgctgtgggtgcatttccctgagattggctttgagaaggcagaaactgctgaatatgccacacactgcagttgaggctcagcttctcagctctttttgctgtatgtgaagtgatagccaggtttccaccagggtctaatgaatcatgaggggaggtcaatgggcagcaatttctcattgcctggggtcacctctggatgtgggaatcagcgacaagtaggtgactaacgggaaggacatccaggaaagagagagaagagagacgaggcgagacgaaactttgctcctcctaagagttctccagagtctttcgacattttatcttctagaggacagaattctgcttgctagtatttagcgaattgaattttgtccttagagacgtgcacactgctcccattgacttcaatgggagtaatgggccatttggtcccgcgacatctgtgttggcttcaggctatttaacaaactcctaaacaaatcccaataaagtgctctttaatgggtacttaattctggtgtaggggcgggtgctaagcacacctaagtcctttcttttcctttaggtttactaagtttcctcctttttatggtgtgataattactaaaggcaagaaccctgagtcaagcagtataaaacccactcacagtcacaaggcttgtgcttttattgatctcagttggcctgtttattctctgggttccaatttaatggctcaattgattattcatttacatttttaatgtctttgtgggcaaaaatcattttaacttgaatcatctctcaatgggcgacatacgaaatcattttggattgtaaatttcaacaagtatctattgagtcactgagcacaggtgaacttgacaaagatgaaaaggacatttcagtttcttgtagaagatgatggaaatgatagtttggtgtttgctttgaaaaatggatgtcacatatgtgtggctcacctgacatcagagagtggttagaatatcaagttttctgtcatttacttactaattatattttgtctaaatacaatttgaaatctacaatgcctacgtctttagttgaactctttcttaaattaaatccacgagtttcaatattattcattggtatgttttccttttagatggtccagctttgctgtagaaatggtgagagatgattatactacagagttcacaacataatgagctatagcttgattttatgagctcacaaaatttcatgtttagcaaaagtaggcaacatgcaagatctaaccacacttatgtttaaaacatgatattctttttcaaagccctttaaagtatgcgtgtggatttgattagataatgatttattccttcacagcaagcaggtaaagttctaaaaatatggctgcttgtagcttattcttcttgatgggactgtttcgaatacaatacttataaaatatatacccactcacttagaatcttcaattctttctaaaatgagatgaggcacaagaaaatacataagtgcatatttccaaccacactcgtcacttttatctgactatataaaatggaaccagagtttaacatcaaagaggaggcacatattcatcctttgaggaatagtaactgctagtgcttggcgaaaggggcagtgaaaagcgaaaccgtattgcaaagtttgacactgtttcactttactaactttcacttgtaattttcataatcttattacaaaatgtgtagatcaaggaaagcaactcatttcaactcttggagaaaaaaaattcagacaatcaatggtattattctatccatgtggaattactaaactgtttcctctatgtcaggtttacgacaggtagcagattataaacataaataagataaaattaggatgcttagaaatttccagtcttacagacatgtaaacagatatttgaaatataacttgggattcagtgcttttgcttccaaagtgctagtgaaccctctggtggtctcagagagctttaaggaagagggaaatttgcgtgcggtcgtggagaatgagggagttcaccaccgtgaaggtcgtgcaaaggatcatccaaagtgaggtgccagcctcagaaaacaggagtcaggagaacatggggatattgaagaaatgatagattcttcatcataactcatgtgagagtacaggcagtgagggaagctagtgcctgagttaatgaaaatgaaaatggctggatgatgaagagttttgaattagaagaaattcaactttattatgtggacaatggagggtcactgcctgactttaaataaaaaggggcctgaatttttgaaaaattctggacaataagcagaaagcagaggggggtggtgccagtaaaagaaagttcaaatgggggcgggtcagagatagtggctgatgaggactggactccaagcaggcatatttccatcctgcaccctgaacaagcacatggagcaagctttattaagcactcatcaatggggattcatagtccctttcccatgacataatccactctattggtacaacctctaaatgaattcctctttgttaacttacgttagaaacttttctaaacatttacatagctacttatcaagttggaatcatattccatggtcattttcaattgtggtcatagtcttattagagctggaaaaatgaaaatacatgtttaatattgtgattggattataacatatactgataagatgatatttcttttaaaaaaaagttcccatatatttgatgataaaaggatcgttagaaaggatcaacaaacaaaaagaaatgtgaattatatacacatgcattattaaattacttcagaatattcagttagctttatataaaagagcatttttatgctccatctgatgagtttaatgactatttgatactttcgttctgtttgttcagagcagacatggtcgggtgaggtcttgtgtgagtcccatacctgtgctgtcttcatacaccactgtcactgttttccagttgtaatagaggaccagatccaggatcgccctgctgatagctgcataatctgggtaaaggttgatgtaaaacaaatctttgttgtccaccgaggggtgtttccagcgggtctgtatgtgtggaacttcgagagcattgcaaatagactgcacagcactgacggaggagctatgggaagggccaaagagagcagccacaccaagagccagctggtcacatgctgatgcccaaggacaaggagaggatggggagggagggcagggaaagggggagagaaaaagagagttctatgaatttaattttttctttcatgattcctctttttaatgcaactattgaaaaatcttttacaatccctgtctgcatattgaggaaatacggttggtccaacttccaactttcttgagctgctaatgtactgatagatgtaaacttagaactgattagcaatataccaacaaggccaactccctgctggtctcactttattacctttaatcagatggagtctaaatcccttgcttggtatggtgttacctgaaagcactcctagttaccaacaagccctttgccaaatgagtgttgtatgaattaagttctgtcatgcagcagggtggcattgaaaatattaatgtggttataaaattaatgtagaacctctcggtaactacaaagtgctttagctcctatctttccaaaactcagaaagaagttccaggtaaatgaaatactgctaaagaatgttcataagcagtgctgctgtctaattaattttcaaataatgaaatagcatagcttaaagggatctcagaagacattttgtccaacccactcatttcatagacaatgaagagagtcatggccactggacaggagctttagctcaacatcaggcctctttctaccccagggtcagctgacaggtagcctaaatacatcaagtcaatatctactgaaaaatttagttgtaacataaatgtatttttctcattataagaatataagcactcactgagagaatttagaatatttaaaattagggataaaaaggctctgggattcatcctatcattttggaataatatctattaatatttgggaaaattagaatcattatataaatacagtttgacatattactttctttaacactatagcatgtctttttttcaagtccttacaaattctcctaaagcatatttttagtgtctgtagaatagaccatttcataggtgtgtcatcccttatttaagcattcctataatattaaacatttggctcatgcctgtaatcccagcactttgggaggctgagacaggcagatcacttgaggtcaggagttcgagacctgcctggccatcatggtgaaaccccatctctaataaaaatacaaaaattagccaggtgtgttggtgtgcacctgtcgtcccaactacttgggtggctgaggcacgagaattgcttgaacccgggaggcagagattgcagtgaactgagatagcaccacagaactccagctggggtgacagagcgagactctgtttcaaaaagcaaacaaacaaacatcccccaaaacatttaagctgctcctaatttttggctattataaataatattatagcacttaccttagctcttatatttttctctgaatcttgtgctactttctaagagtagatttccagaagttaagttaccagttataattaaggggtatagatagtttgaagtcacttgaaacatattaaccaaattcccttccggaaaggttggggcagtttgccctctacaaccatgtaaaatagtgcctattaatcttatgttggtaggaattaaataagagcttaaacacactttcaaatttatattttaattctgcaaatttagaacggtcatcagataattaaatatcaaattagctaaattaatacataaaattgtattgaatattaatatcattctacaaataaaaatagtttgaaaaatgatatggctctgtagttacctgacttaattcagacagaataactgatacaactttgacagccatattgcaggtatctaaggaacagcaaatgtttacaagaaaaactttctgctactctgctctttggtagtgaactactgcattaactacgaagatgtacagttttgtccattatgtgctggaagtgtaaactgtcattgtcttcagaagcttattttctggttaggttttcattatttagccagataaaaggagagtatgggagtgtgtgaactccagcatgtggagctggatagtgttgttctatccagcataagcaatggattgagattcctgttaatagttagctctgcggtactaatattatttgacagaaaatcaatccttttgaattctgtttgccagcaaattaccagttttaagaagctctgggggtgtttaactgacaagtaagccaggtacttcagaccacaggaaagctttcgatttttatgtggctagagttccattgctaaatgtggttggctttctacagtatttgctccacaatgtgtaggagtgttagtgtctgtttgcataggtgtatgtgtgtaagagagagcgatgagagaaagaaaagtgatagatctatctctacattatagagataatttatgtgaggatagcttggaaactttaaaatgctgtataagtatatagttttattatttgtccatagacaattttgacccatatgatatctcaaagtctacccatttttaaaaagaaaatatctttatacttaagtcaggccatagatataaaaatattatgttgttaatgttttttgttttgtttttgagacggagtctcgctctgtcacccaggctggagtgcagtggtgcaatcttggcttacttcaggctctacttcccgggttcacactattctcctgcctcagcctgtggtagctgggaccacaggcacctgccaccatgcccggctacttttttttgtatttttagtagagacagggtttcaccatgttagacagaatggtctcgatctcctgacctcgtgatccacctgcctcggccacccaaagtgctgggattaccggcatgagccactgcgccctgctatgttgttaattttttatctgtgctcctaagaaaataagttttatattttgtttgcaaagaacactagaattcttgcaggaggctgtatcaggtggacacaacctatgatctaactagattaattctacatggaaacaaccagcatttagtaacctggaaatcagcataaacatggtgttcattgtgtttccttatttgtgtgtatttagtaggcaaggattcctctctgaggcaaagaacccccccaatctggggtgatgagtagcctttgtttccacataaacacatttatttagtgactagatagtgtccctgttagaagccaaccctcaactatgtgatcttacttcaaagacttgtcctaatattgtctagaagatgtctaagcaagccccacaattccgaatgaatctttccatgagagaaaccttgcagccaacatatgaattagattactttttaggctaggcacttggcttcagttcagaagaaaaagaggatcggatgtagacattgctctcacaggtttaatcttcatatttctatgattttgtggaaaagagtaaaaaaaagttgagaggatgctaggtaaactcagtagtttacaacctgttaaaattcagggtgtgagttatgtgtgtcctgggcatttccacatgctcagtggattgaccttccataatgttttatttgactgcaccgcacgatttcatggtggtatctcagcttcaggaaggaaaaacagatcaagcttgacattttccattcacagctgagctagttaatcatagagtggagggcactgaagggtaagctcatcagaaaggcccagaaaacagtgctcagcaacgtccattaggttagttcagattacactgatcagtgacatcgaagacccagatttcccgcgacccatttgcacaaagatgcccgctttaaaagagggcaggtagcaaaaagaaggtgacttggagagcagacatatcacccaaagaagcttttaaaagtgggaaaatagttacctctccgcgaggcttcaaaactatcaaaaaggttaattctctggatgtcataggttaatgtggtgttaggcatcagggttcggtttctgttaatgctggtgactgcaaacttgaaagctaattcttcaacattaacaggctcattttccactgtttcaaaaatccctcctgcagaagcaaaagagatgcatgagaagcgttagtcacatggttcacatgtaatttttttttttttttttttttttttgagacggagtctcgctctgtcacccagactggagtgcaatggcacgatctcagctcactgcaacctccgcctctgggttcaagcgattctcctgcctcagcctcccgagtagctaggactgcatgtgtgcactaccatgcccggctaattattatattattagtagagatggggtttccccatgttggccaggctggtctcgaactcctgacctcaggtgatccacccgcctcgacctcccaaagttctgggattacaagcatgagccaccacacccggccagtaaaaagaagaatgtacatatacaaataagagaccccaaatgataaatagagtaatagagcagatcctaaatcccgggctaaaagtgaagtttatcagcatgtgccacatgcagataaataggactaactgcatatgtatgcttaagattttaaatccagtgttggactgtataccatctctcagatggcaaatgtgttccaaacatttagtggtataaaagtgtaactgataatatggcagaggacgattttctgtgatgtggacaagaattgcaccatgctcgatctaaacataatttgagctgtatccttgtaggaccattcttctttagaatgaagatctttctattcagaagcctacattccagactctaaggggatcatgcagagttgatgggatcaaaatgacacatacatactgttagatttttcaagataaaaatgtccttttttgtgcttcatggctcagaattctgagatcatattctagtactttccaaagtgcatgagaatattcaaagaactggttttttttctttcttttctttttttctttctttcttttcctttttgtttttagaaactgtttagtccaaagcaaacctgcatcaggtaactgaagaaatatgtcccttcactgagcaagtgcacatgttctaggtaggctctggtgtcttaaacatgaggatctcactgcaagtaacagtacaaaatgttagtgcttaaagcctcatcagagaatgagctctgattttgcttgagacattgatgtttgacagaaacaatgtaagtgttgttaactgtacagttcttagatgttttctgagagacgtcctaggattattaatagacacagggcctacagtggaagctttcttaacccatctccatttaagttactccttgattgaccaatactcctcatttcttttgaaagtacatgttaactgatgctcatggaatgctaaacacttgtaacttgcaggctgacatatctatatctatatcaatatctatctatctatctatctatctatctatctatctatctatatatatatattttgagatggagtcttgctctgttgcccaggctggagggcagtggtgcaatcttggctcattgcaacctccgcctcccaggttcaagcaattctcctgcctcagctacctgagtagctgggattacaggcatgcaccaccatgactggctaatttttgtatttttagtagatatggagattcaccatattggccaggctggtctcaaactcctgacttcgtgatctgcctgcctcagcctcccaaagtgatgggattacaggcatgagccaccgtgcctggcccaggctgctattttttatctactctcaggattgagtgatcccttaccaaaagtcagttgtaggttttacctaacttgtctatgctaggttgatttacaagtgctctcagttctctctccattcaaagggggaaaaaaaagaatatagaaaaagtctgaaacgaaaatcacaaatacgcatcatgcgcgtcatttatgtgcattttttgttagaaagggaactccaatggacagactgtaattcaaagaaattaccctgatcctactttgaaaaaaatgcaataaacaaatacacatctgtaatgttcctgctgaaatgactttattaaataactaactacagtgttgggttgtgaaagctaagatggtttatagtgaattattttggctccttttggaaatatttcgggcttttgtagactgataatatgggacattcaggtatagataatttccctggtttctgagaaatcatagttgaaaattgtatgacaatacacctactatgtacccacaaaaactgaaattaaaagaaggaaaattacatgacagagttatttggtaatgttaacctttacctaaggagccatttaagacctttatttgaaatgaacgtaaggaaaaatgttgctgttcaagtgaattttgtgttttacttttgtcagacaatggtagggagagactctggagttgattttcagtttctctcagaactgttggtggatgctcaacagtgaggtgacaagatgatgcaaaagacacttggtcaccagaaggtggacataagtccgtcttactgccaccatctaggtgacccatacagagggctgcctggcgatagggcttccacagtgattatgaacaatgacttgtttacttgtctgtctcctcagccccacagggagagcccgcatgtagagagactgtgtcttactcagaatcagcatccttggggagaccaaggcatctttaggacgttcaggctgcaggtatttaggggaaaagtcaatcactggcatggatgtgagcaccattaatctgtgcagggtaggctgcttggaggaaacaaatacctgaataggaaacagaaattctgaattttgaaacctgatctacctacttcctctttgagaaggatttttaagtatcagaaagaaaattattatgaaatagctcttttacatatgtttaattacactttataacattcaaggcaggagggtttttttccatttttataaatgaaaaagtgaacaagaagattacacattacatcctgcttattcaaaatcacagtcttgtctgggactgactcagttgtctgaatgtccaaaaaatgtaaatgttttcatttcatcaagttatttctgttgttctttgtctcatacatgtgagctaatagtgttgtcttgcttcccttggagaattgctctataaagcaaatgagaaaatgtaatcaaagtgccctgaaaactcaaaaattccctagaaataagttttttttattatcgtacctggataatggaaataaaaagaggagttggcaccaactggtgaactgactacttgcctcaaaattattcttttgctatgtagttgtctatcacataaagccaaatgaacctgggtttaagggaattacaagtgttttcattatgtgcttgggtagtgtgtaggtgaactgttttgtcactttcagagcaatttttttttcattttttcatcaaacaggcattatgaatggtgtcattagctcaagaccccatcacactctctttcttcaagagagggttgcggataaatgcgaaaaatctactgtggtatgaggtaaatagaaagctggagatgtaccaaaaaagtgagatctgacagaaacaggagaaagttattaataggagccagaccattacctcacatgtgggcagactgtttaacgatcagccacttcctccctccttctcctccccatagcttcagatacaacaaaacgagatgtagagtctttaataagcagaataaaggggcacacacgttggggcccttgcataatttcctccttcggtctttccttctctccttcttgttctctctttccctctctttttttcctttcttttcctttcctttctcttttctttctttctttctctctctctctctttctttctttctttcttttttctttcttcctttctttctttctctctgtctctttctttctttctctttctttctttccttctttctttccttctccctttctttctctctctctgtctccctcccttcctccattcctcccttcctccctttttacttcttttgtataataattgtgagtgtgagctgtcaatgagacgtctgaaggctttaggggtcttcatgttgtgaacctctggcctcattcatttggaggcccattggtttgagatgagaaatccctacctttttcatccctctgttcctcttcctctctctgtctctcatttgagcttagctgacttctactcctaacaatgatgtggaccatggaagggttaggaaattgaaataaaaatctagcttaggctcaaggaagagaggcaaagttgtcccctccccttgtatttttgaaatttcccaagccagggcagtgggtgaagggagaaggcaggactgagagctcaggatgaagaacaagctttttcattctgctataattcttgagagaagtagtgcatgacagatggaacacaggagggtgagaaacctcaaaatcggcaggcctgggttgtccatgttctctttcattgctcgtgtgtacctgaagcatgagaagtattgttaaactatttttttatcatgtctatgtcgtagatcagtttgagtcagtacagatcacctgccagtctttatagactggaaatggttgggcagtaatcctttgtctgatcatcattaggaagcttgatcaacggtcaaggtgcatgcttaatatccacctccccagcctcttctccacctcacccaccattgtcgaagcaaagggttggaaagtgaaagaagttgggctttttctttgagtaatgagtctgtcttatgtgaatatttgtgccatttaaaatgataagggtaaaatcatactgcttgtaaacaccagaatagataagaattctgaaaaattaatgctttttttattaatacacgttcgtatttaggatttacctatgaggactttgtcctgattgctcccactgtacttttctgggaagcatagatgttggtacaaataatgctgatgctaaactggtctgtccttcatactctgtgttccctcacctgagacaaggtgccacatatggtcactaaacaaagggtatgagacaataatgcctgtgcctacattctggagtagctttgaaactcagaagcgacttgctttcttggtaagtcactgttatggactgaattgcatcctccctcaaatttatatgttgcaggcctcacctctggatcctcaaaatgtgactgtatttagaaatagtgtctttaaaacagtgactaggttgcaatgaggcggctagggtaggccttaaaccactctgactgggccttataagaagggaaaatctggacacacagatataccagggacttgtgcacacagaggaaaggccatgtgagggccaagcaagaaggaggccatctgcaagccatggagagaggcctctggagaaaccaaacctgccgacacctccatcttggacttccagcctccagaactgagagaaattaagtgtctgttgtttaagccacccagtctatggtcttttttgtttgtttgtttttttgtgtttgtttttacagcaaacctagcatagactagtacatttatcagcatcttttttttttttttgagatggagtctcgcactgtcacccaggctggagtgcattggcgcaatctcggctcactgcaacctccagctcccgggttcaagaaattctcctgcctcagcctccctagtagctgggattacaggcaagcaccaccacacccagctaatttttgtatttttagtacagagagggtttcggcatgttggtcaggctggtcttgaactcctgacctcaggtaatctgcccaccttggcctcccaaagtgttgggattacaggcgtgagccaccgtgcccagccaacatcttcttttttttctcccaagggctttgaaattgaaaataattttaaaggaactcacatatattcaagtaatattctcttctaacaagattctgactttacagcgcagtaatttaagataagccaagaggaattcacttgaaatcttggtttagacagcagagttccgtcaccacaggagcatttctgtctgttttgggtagactcttgaaccagtgaagtgcagcgaggacgtaggcagttgtgttttgtgactacctaaacacagatggaagccacagctggcaacatcctgtacacctggcaggtggcctttaaggggggatgatgggtgcaatgaagggttgccatgaaggatgttgggttgtgccacataattccatctagacttacaggagaattgttctgaatcacaactctacaactgctgggtcaacaacataatcattgtaggcaaagggtaacacttagagaaggctaaggtcaataatgtgctattcgtgaagacacccaaggtaaacccacggcaatggcttccaaactttcccttaatcccacattatatggagagaatcagaatgtcaaaggggtggaattcagcaatcttaatatgaaaaaaaccatgcctggctctaggtctcactgattgactttttttttaggttccaaggatacttcctaacctgcttttcaatcactgtttccatggaacagggagctatccgaatcaactcagtgtaacatggtggaaatcaagccattgttgtgggtaagaaccttaaagggaggcaattccactgctgcctactgattccatctgtctctagattaagcctgtgctgagagattagtgaaagtattaaatttaccctcttcttcccaaaaggaatttcagacaatgtttcattgtggcagagaatccatctcatttaatgatggaaaaaacaaacaaaaaaaacacaggaaaataatggttttctatcttattcctctcaaaggaatatattgttctgactcaacttaccttgtaatggtaaatatattccaacgataaccatttcagaaatgcaatagaattaaaatccacctatatttagttgttgttgttgttctacttcaattcatggttatatatattatgtccatgattctactgaataactcgctcatccaatgatttgttcatttatttcctcatttatttgtaagatgcctagacagatactgtgtgaggcactgggatgtgccagtgagcaacagatacgcatctgacttttggagcttttattttagaaggggaattggtcatgaacaggaagacaggcattgacatgtcagagtgagaggtgagaaaagtgcttactgggagggcacttttgagcaaaagcctaaagataatgagaaaaccactctgaagatactgggagaagagcgttacagccaggggaaatataatgtctaaggtgggagcagcctgatgctatttttgaggaagagtgaggctgaagtcgggtgagctgggcttggactggtagaagacgagctcagagaagtgatgggtggattggagcagatcacagagggccttaagggccatcacagggctgtggttttgttctgggtgagatgggaaaccactggccatctttgagcagaggagtgaaatgatatgacatatttcaagagaatcaagctgacttttgtattaagaatagactgaagggaggagaagggcaagaacaaagcacagggagatctgcccttggagatgttgcaataacactcttgccgtaagagtctatttcagtaatccaggtgagagatgatgatggctttgtacaaattagtggaattgggatgtgacaaaaagtggttgaattctagataaaatctgaaggacttcggcaggatttgctgatgatgcataagtaagaggaagggagttgaggataacatcaggtttttggcttgaaattgccattgaccaagacgaggaacgatgcaggaggtacttgacttgggacatgattcttttgtggtgcctattagaagtccaagtgaagccatcatccttagcaaactgatgcaggaacagaaaaccaaagaccacgtgttctcatgtataagtgggagccaaatgatgggaacacatggacacatagaggggaacaacacacattggggcctattggaggacaaagggtgggaggagggagaggatcaagaaaaataactaatgggtactaggcttaatacttgggtgatgaaattatctgcacagcaacccaccatgacacatatttacctatgtacaaaactgtgcatgtacccctgaacttaaaatggaagttttttttaaaaaaaagtccaagtggagaggccagctgtgaagttagatatatcaatctggatcttatggcagagaggttgggcctagagatagaaatttgggagtcaccaccataaaggtggcatttaaagccatgagactgaatggcatcacccaggagtaagtgtagatttaaagaggcagatgggtcacttgaggtcaggagtttgagaccagactggtcaacatggcaaaatcccatctctattaaaatacaaaaattagccaagcatggtggcacgcacctgtaatcccagccactcaggaagctgaggcaggagaatcgcttgaacttgagaggcggaggttgcagtgagccgagatcgcaccactgcactccagcctgggtgacagaatgagactccatctcaaaaaacaaacaagaaaacaaacaaaaacagacagagactggagtgatgcagccagaagccaaggaatgactgaagccaccagaagctggaggaagcaaataaatgaatttctcccagagccttcagagaaaataagaccctgccaatacccagatttcagacttctggcctctggggatctgtgagagagtaaacttctgtcgttttaagccactgttggtggtaatttgtgatgatagacacaggaaactaatgcagcatctcaattgtcttcagaaagttttcatattggtcacttttaattactgtatttctttcctgtttgtgaaatgttattttattcagttcttcaaatagcaatttttaactctctagcatgattttgcaaatatggcacatagttgtactgtacaacacattgagtttttatgtttatgatattttcctattctgaatgtgacagggccaagatactatatgtattctaacaaagctcgcttgctcccttaactaacttctgtgtgcctgttgtgacaatctgtgaggtcatccaggaagaaaggtaaaaccattagctgacaatcaagacatggaaagcgtttgtagtgttgactcctgttttgcattcctgtggaataataaccattccagaagctatcaacagaaaacaagatggcaatttgatctattcctttgctgatagctgctccttaaatatacaatattctatagcctctctattgccacatccataattctagttgattacatcataagcaatttactataggcctatatttactgcacctttaattccaaggctacagatttaaattctaagattcccttagataaatgctgtcttcctcactcagctttcgtatttttgttttatctttggagctcaaaacattcttggtaaagatcccatgctagatggatttggatgggaagcaggtgtttcttgacctgatggaaagtgaatggacagaagagattggatttttacctttcagaaagtcccagccaagaacagagctgtggttaaggacaaggacagcttcaactggaaactggctctaattcagtctgctataagtgtcttcaggtattagtatcctttagagggggagaatggggtttgatgtcaccgttgagacaataaccacatccagactcactctttgatgccttaaagagatttgcattaattcactaggaatggcctttgagggataagaaaatatggagcaaggaattatggatgtacttcagagggtagctagtaagagaaaggccgtggattatgggcagtttagtaaatactattagtaattttccttcataaatttgagttgcactataaattacccaaagccaaagttactcttattccagtgttattcaacactcagtttaactcataaaacattattagacatctattaatatctaagactatgctaggaggagtggaaaatacaaagatgaaagatgcttggttcctgccctcagcagagcttccagtcttttgggatatactgcattactggtgtagagtacagaaaaagaaagtaggtatagtagtcaattattctatcaataaagcaaaaagcctgctttttgtctcctcctatgtggaatctttcctgattcctccagccagaggtgaactctccctttcttttggtaaccataaaatctactacatatttcaaggaatttattttggtgtaaaataagcctacatcctgctctgcctgttccttgaagatcaggacagatgtttattgaaatgtgccttctccttcagagctaaatgcaatgatttggtcatagtatgttgtccccagtaaatggtccttcagttgaacttactctccttcttgtgccttaacactatgcctcacaaagtagtttgttctgccaagagagaggcctttgagatacgtaggaaagatggagggtggttattgaggtctgtagtgagactgcctgactttttccattactgcctttttagcagtgatttctcactctctcccaacaatcacggcccattgtccccaagcactttcaaagcatacttttcatcaggctgccagccccttaacatcatgaaggtatggctcatctcctgttcaacagcagatttcaggcaagaaccaggaatattgccaaaaattcatgccaaacttttattcttatgaaactctgtgatcactttaatgtctcttgacagcagttatagttttagcttttaacatctcatttaaatgactcatattcatgctgaagagctcatgattctatttatctccttattaattaaatgaatggaataagacaagttcacaacctgtggttccagggaagctatattatgtgttgcatcccaattttctagttttcttcttctgtatttctgttgtttctcaacctgaaatttcttgctgagaagaagatattgctgttaaagattagaactgatgtttgaagccaaaataaatggaggctcacagctcccacagagcagtatataccgatgtgtgtgcgtatatgttgcccatgagatcttatacatagagagtttagtggtcaaatatgcttgggaggcactgcttcatttcatccttcttaaaaattcacactacacaatgacatttgtctctcagaagtcctgcagcaaagaaaacaatttgagtgtttaactcagtatcccccaaattcatttgatgataggacagttttccttgtaaccgtgacatgcagtggaattgttgtcttaagaaacactttttgaaaagtttgatctgtagatctactctctttgggactgactaaaataatttgcagtcttaaatattgttcttgtgctaattttaatgaaaagttagacatcaggttcttgatcagaaataaaacctctaattatgacactactttgtatctaattcatatcagatttatactatcaaatcttacctcatcttttcatttacaaaaatacctaagcattaagatggtctgtatgtctatgaaaaacagcatcttttaatcaatcgtatctcacagatatgttgcaggtaaggtgcatgtccatgacatttaatgtaaatatttaaaatgcatttgctatatttttttctttcttttcttttcttttttttttttttttgtgagatggagttttgctctgtcacccaggctgcattgcagtgatgcagtctcggctcgctgcaacctctggctcccgggttcaagcgattctcctgcctcagcctcctgagtagctggtactacaggcgtgtgccaccacacccggctagtttttgtatttttagtggagatggggttttgccatgttggccaggctggtctcaaactcctgacctcagatgatctgtccgcctcggcctcccaaagcgctgggattacaggcatgagccaccatgcgtggcctcttctttttcttccttaatattttccatttggtttttaaaacatctctgtatatttctgtttcagcatttgaaaatttaaaaaatccatccttttaataactttttcatttactgatttaaataattgtacaaaatgatacacactaggcaacaacagtgctgtagaacatctaaaaagctgacagcatctcagatgcaagcatttacacatttaccacgacacttttcctttaaagtgtctgattgaaactctgtatttactattgttcataagttaccccagaatacagaaggtagttctgttactaataccttcctagattgctctcagtttcattctaagatccaacactttaaaatgaactgagagtctgcattgacatgaataatgaatgagttcgatgaaagttatttctcagagaaaatttctttgtgaagtagttaggtcccagatgaagagagataagcttgactaatacagatatccaagaaagcttctggttgattgaaaataaaggacagttaaacatcatatcacagagggatctgtgttaggaatgcctcaaataagaacttttggaaatacacaccatttatttttaaagtagtaacatctgaaagtccacttgactgctcaatgcacgtatttttaaatgtgctgcactctgtgaactcccacaatggatattcaaggcatttttttttttgaggcggagtctcgctctgttgcccaggctggagtgcagtggtgagatctcagctcactgcaagctccgcctcccgggttcacgccattctcctgcctcggcctccaaagtagcttggactacaggtgcccgccaccgcgccctgctaatgttttgtatttttagtagagacagggtttcaccatgttaggcaggatggtcctgatctcctgacctcgtgatccgccctcctcggcctcccgaagtgctgggattacaggcgtgagccaccgcgcccgggctattccaggcattttactttctggtgtgtctgatgtgtgtggagacattttttattctaaataattttattttaaaagcacacatacaactataaattgggtaatacattgaaagaaaggggaaaaaacaagacacaaccataacactgtgaaacaatcactattaacagtttggtgaatttccttctattcttttcctacacatacctgaattttctctgaaatagttaagatgactctatccggctttctttctttctttcccttcctccctccctccctccctccctccctccctccctccctccctctctctttctctttgtttgtttccttctttctttcttttgagacagtgtttcactcatattgcaaaggctggagtgcaatggcactacctcagctcactgcaacctctgcctcctgggttccagtgattctcctgcctcagcctcccgagtagttgggcctacaggcgttcgccaccacacccagctaattttgtatttttagtagagacagggtttcaccatgttggccaggctggtctcttagctcctgagctgcctcggcctcccaaagtgctgggattacaggcgtaaaccaccgcgcctggcctgactctatcctattttctcctgtcattttcacataggtacctcttcctgaacataatccaccttttcaatggctatttaatatttcattgtctggatatgtcacagttttcttaatccaccccacttttttgggtaagttgttgtcagttcttcactgttatacattctattatgattgacattaagcacttttcgtgtttttacttggagagagtaaaatgtcttgtaattacgaaacataaggtataaacagtttaggcttttattatgtaatgctacagggacctgcagaagtgaaggctgagcaatttatatgtgcatccatccaccatgtagaaatgcccaactgaattgcaacctccctcagaatctgtatgattttaggtcaatgtattatagaaaatatttattattgcttcaagttgcatccgtttgattactgagtagtttaattttaaaacttatttgctacctatttatacctctgtaattttaaatcacttgttcctcctgtcttttgccttttttatatcctgagatatcattactttcttactcataatgatataaaatggtcagtattttttattgcaaatgttttctcagtttattatttagctttaatgttgattagatttttgggcagagaaatgtttacatttataattacaaatacattaattttttcctgaaacatgaagcattcatagtagttgttactatttccggttctttcccttcggaatacatgcgtggattgtacctaacatggggttggttggggctgtgtgactggctctgttccatgacttgtgagcagaagtctctggtgtcacttcctggacagaggacttcattgctagtgagagaattcccacacctctcttctgtttccctctgcccagtgactgctctttcagcctgggacgttggagcagagcctgcaacagactcactacagccatttcagcaaaaatccatcttttaagcctcaattttaatcctctttttaaaattttttaatttttattttttttggaagaattatttgttacagtaacagaatctagcctatgtgggactgttggaattcaaaatttctcctctgcccacataattgataaatataattgctattgggtttttaacaagatttttgtgttttcataatttagttcatttaatccatttgaaatatcttgacgtgtggtattagaagaaaagctagtacaattatatatgcaatatataactgtataccacatgctgtttataattttatatatatgcatacacctacacacatatatgtctataatttcttactgatctgttataccacctttgtgacataataattgtcatataatttaatttctggactcttctgttccattgatccatctgtatagtagcatcacattgtgttaatactggttctaaaacttgctggtaaataaatgacactttctataggatccatttactcttcttcttttttttttttttttttttgagacagagtctagctctgttgcccagattggagtgccgtggtgcaatctcaactcactgaaacctccgtctcccgggctcaagcaattctcctgtctcagcatcccaagtagctgggattacaggtgcccgccaccatgcccggctaatttttgtgtttttagtagagatggggtttcaccatgttggccaggctggtctcgaactcctgacctcaggtaatcttgaaaagatttgcttattcattggaattttgttgagaatatcattaaacttataaatatatggggaaatatttttttaaattccatcttcatatctaagaacatgggcacatttatatttatatcaggatatttatatttattagctttattttatagttttcaaaaacaaatcatacaatattttttcctaggtattttgcaggtttttttcacagttgagtttgatcttttataattttttttgttattaacttgattttatgtgtgtgtctatttacattggctcaccttctcacattatgaaatactttaatttcctctttattattttgagttttctcataatgtaatactcttcaaatattcattatttctgttttgcttattgcattggttagaattttcagagtaagaaaatgagaatgggtcatcttattttgttcttaatttaaatagaaaagcctgtactattaaaccattatttatggtttggaaggcagattgaaataaatgctatattattaatttaatataatacaataaatgcaaattaaaataaatattatttatactcatatctcaatatgcattgaattttattaaatatttttcagagttcaatttgcccttctaataagttatttcatatgaatactattctttatattaactcatcctggcaattctgggataagttgtatttgatcagtgagagtttttctttcaatatgttgctgaatgtgatttgttgatattttatgtagcattttgcacttattaataaattagatttgtatataagttttcttattttgtgtattggccttgtcaattttgtcattaggttatctaagcttaataaaatgtaaaggatagttttctatcctgtcctggaaaagtgtagaaattccattcagcttaaaaaaactaatcagtgtgactgtgtagctctgaatgcttctgtcaagagttcttcgataaaatgaaaaacatttttccttagttattgatatttttgagtagatgtcaagaatttgttttagactgttacctatttcaatgacacaattttaattattatttattttagactattatctatttcaatgactatttttaattatttttcatatacttatttaaatcatattatataacaattatcattggaatttaaattgttatgctaccattattgttatatttttcttatttcaacttttgcctttccctccctccgtccgtccctccctccctccctccctccttccttccttccttccttccttccttccttccttccttccttccttccttttctctccctccctccctctctccctcctcccaccaaccaccctccttccctttcttctttccttccagcagttttatctgctttaaaatttaaagagtaacccattcttggattgtcgccttcctattttgatttttaattcacttatttggttttgattcttgttttgagtttctccttatttactcatatttaatatttcttgatatatttctaactacttgaattaaatgcttaagctattatatagttatttcagtgtttttttaactcaaaacttcttaaaacatgaggtagaacatcaagcatattcattttcatattacagtcacacatcatataacgattattttggtcaatgatagactgtatatatgaaggttatcctataggattataatgccatatttttattgtaccttttctatatttggatatataaataccattgtgttacagttgctaaaagtattcagcacagtagcatactgcacaggtttgcagcctaggagcagtaggctataccatatagcctacatgtgtaataagctatgatgtttgcatgacaaaattgcctaagaatgcatttttccagaatatagacatgactgtatttttccagacaataacaagataaatatctagtatgaggaatcagtaaccccttcccttacaatagacaccaaggaatctgtttgtctttttgagagattagcagaaaatagtatcaatgtgacttttatgggtctctgcttccatgcaatctatactttctgtcattttagctgttgaaatgtaccaatgtatttacactttaaaaaaatttgttaaagcattgggtttgtaggtttactgctctatgtaactctggcttatttcacacattttattgtgggtatttacatttttattttacagatatttttaaatgcacacattatttcctcattgactcaaaagttagacgtatttttaaacttcaaaagtttaaagattttgtaatttttttctaatgaaaaacaaagtagctcaagtatgttactgaaaataaaaagaaaacttgtgaaatttttcttttttgaaaataaagaaaaaaggagaaaaaaatcatctacaattctagtacctagagagttactgatatcaagatttgggtgtattttcttccaatccttttttgctatgtgtatttataaatatgtgtgtgtgtatacgtatataagtatatgtatacatacatacacacacacacacacacacacacacacacacacacacacatatatataggtcctggaatcatactgcatataaaatgttgtattttgtgtttttttcttaatggcattttccatgttatttaatatttactcaaatataattttagtgatgtacaatattccacctaaaaacacaaaagtttatttaggtaactctattgccagacattatattcatttccaattttttgctataaaaataacgtttcaatgaataaattcttgtgaataaaatggtattggtacatctctttatttccttagttcttttatataaaattataacatattatgaagaatatgttcctttttaaggatcttgatgcgtatcacctaattgtcttctagaaatattgcatcaacttacatgcctaccacgagtgtatgaaagtactcatttctctaaatttccaagtattgtaaataaaaaaaatcaacttctgaggaataaactttgcaattgatggctatttaaattcatattacattgattattaatgtagctgaacgtttttccacaatgattttattgtatttcgttggattgcttctttgttagttctgaagtctttgccttgcccattttgaatatttatatttatcttcttttgcacttatacattaaggaaagaaactatcttccaattacagttgcagatactttttctagtttgtaatgtcttgtaacttcttttgacctctttttctgatcatgacacttttatagttttatgtaattcaatctatcttctcatagtgaagagatttactccaccactttttggaaactttttttttttcttcccactcatgcttctataccattgttcacattgagataagagttgccttgtgatgctatgttgacagctgagtgtttcaacatgtgctaatgtttctcttgctggacttttgtatgaggaccagcagtaaattcgtctgtctctcttcaggtacccaagccatcagacttaaagctcagcagctgtcggcacactgcctttcatcatattgattagagaaatagagggagctatatccagtgataagagtgaaggagatgcagagagcagcagagatctaaaaaaaaaattcttaatgggattcaggtctctccttcttgttatttctagggtccagccacatccttgtccttgcttcttaatatccatataatacattctctatttagtttaaactaatttgatttggatttttgttaaatacaaccatagttgtaattgatattttatttttctgtatttttttcattcttgtaatgcctataaaattattctctgctctaagatcagagaaatattgcctaatattattattttccacagatttaaaaatatttagtgctgtaatgcatttggaatttatcttgaggcatggcatgtggaaacaatctttgttttttgaaatgggtaacggaccataaatacattaataaatatgccataataaaataaactctaattgtggaattttagacaaattgaatagtaaatcttgattgggggttaagatacacttcctaaactctttaagcttggctatgaaggatgtgtgaaattttgagacggcacaaatggagaaagtacattctaggcaaaacactagaaaagatctttgaaatctggaacacattgactaatttgggacagatatttctggaaatacagctgaacttttcctctgccatttgtttttttttgcttcagctgtacagtctttggtgtagcacctcttaatttttattgcactaatttgtttacattagtctcccttgctgagctataagcctgaactgtcttgtctttatagtctcagcaactgtatactgcatagcatatatgaggtgatcaattaatgtttatgaactggatgaataaatgagtgtatgtttcaatgggcgagaagcagtggggaaatagctcagagattttcctagaatattaacatgatctaatctgtattttaagcaggttattctatagttataattccataatatatgtttagagtatctttaaatttttgctctattatattttgtggtttttttttcagacaagtggggtacagtttgctctttacacactcttcccatgattgtctttggtatatctaaggttgtgtctcttaagtccaaaggattaactaagggtaatgatggatcttaatatcaaatgctataataaaactaaaaaagtgtaatttgtgtgaatcacccaaaaaagatattaaccaggaaaagcaacaagaaaagaaatacaatgtgtattttcaatgtggaggacagttctggttagcaatgagggttactgacctgggactgggtggctttccagggatgcaggacatttggtgctgaaaccaggacagtaggtcaccctgtaacctgaccagtatgaacatctttggcttcaccaagagtaggtggatatctacctacccagtagtctgcctacccaggcaggactgggtagtgccgcctgaatgcactgcgataagttttattctttctaagatgcaaatcagagagcacctcaggcaatgtcattgcaagggctggggaaaggattccaaaacccagctgtaaaattacctctagctgtaaatacttttttatagctttgattctaatttcccttgagattctttataaatcaatcaatctctttgttcctcaatttttttaacttactaaatggggatgataacactaaatgagggcaatcagagttatgataacgctaaatgattgaaagcattttgtaagcattgtgtcaatattcttccaatacctaatctttcagaatggaatttagttgatagttcattattttcattagaattcagagtccagctccccataggataagcagtagtgaattgtagcatgatattggatgaactcttaaatgatctggggaactgaagatcactaaccaacctatctctcataaatgccctataggattgggttgaagtcccttcccattgctacataattcagggttgttcaggaatgtgtgtgagttacactggctcacactatgcaccataatttgagctacaattgccctcaacttcatagcacatggggattcactagtgactgccggtggtcagtctgatgagttagcagtttcccctaggactatcataatctgctgacgcaaggcagctcaaggtggaaaggggcttacaccattctaaatgtactaggaggagagacaggaggccagggctgggactaggatgaggcaaggaggcatttaccttggatgtacaatttaaacttgtgccaaaatatttagtaaccaagataagtaatattttaatgtaatatttaaatcaaattaatgcaaaaatgtgtgggaaacaaaatatctcaattgtgagtgaagtcaggatccaacactgcacttgcatgtagctcacatcgcttgcctccccctaatgctgaccctaccaagaactagacttagagagttagggccatagtcacatcacagagtagccttctcatcaatgtatgttggaccatctagaatgtcgtattctacttctatagtgaagtagaaaaattacaaatgcttcccaacacacccctttctacctaagagtagcttaggcactaaaaatatttctaaaaatataaactggtactctataaatgtcaagcacaatgttaagttctttaaatgtagtattatcttattataatccttacaatacattactttacaagatagatgttgatatggtttggctatgtccccacccatatctcatcatgaattgtagttcccataatccctatgtgtggtgggagggaccaggtgggagataattgaatcatgggggtggttacccctaagctgttctcatgatagtgaatgggttctcatgagatctgatggttttataagggactcttccccctttgcttggcacttctcctttctgcctccatgtgaagaaggacatgtttgcttccccttccaccatgattgtaagtttcctgaggcctccccaaccatgctgcactgtgagtcaattaaacctcttttcattataaattacccatctcaggtatttcttcatggcagcatgagaatgaattaatgcagtaaacttgtactggcacagtggggtgctgctataaagatatccaaaaatgtggaagcaactttgggactggataacaggcagagaatggaacagtgtggagggcttagaaaacaacaggaaaatgtaggaaagttagaaacttcctagagacttagagggctcagagacaggaggatgtgggaaaatttggaacttcctagagacttgttgcatggctttgaccaaaatgctgatagtaatgtgggcaatgaagtccaggctgacttggtcacaagtggagatgcggaacttcttgagaactggaacaaaggtgatccttgctatactctagcaaagagacagcattttgctcctgccctagagatctatggaactttgaacttgagagagattgttttgggtatctggtagaaaaaatttctaagtggcaaagcactcaagaggaagcagagcataaaagtttgaaaaatttgtagcctgacaatgcaatggaaaagaaaaactcattttctggagagaaattcaagtccactgcagaaatttgaatcagtaatgaggagctgaatgttaatcaccaagacaatggggaaaatgcctccagggcatgccagagaccttcacagtagcccctcccatcataggcctggaggcctaggagggagaaatggttttgtggtctcccgctctgtacagcctcaggacatagtgccctctgtcccagctgcttcagtttcagctgtggctaaaaggggcccaagtgcagctcacgtcatggcttcagagggtgcaagccccaagccttggtggcttacacaggttgttgaggctgtaggtgcacagatgtcaagaatgaaggtttgggaaccttcacctagatttcagaggatgtatgaaaatgtctggatatccaggcagaagtctattctaggggtggacccctcatggagaatctctgctagggcagtgtggaagggaaatacagggttggagcccccacacagagtccccactgtagcactccctagtaaaggtgagaagggggccaccatcctccagaccccaggatgatagatccaccaacagcttgcaccatgtgcctggaaaaggcacaggcattcaacaccagccatgaaagcagctgggagggggactgtaccatgcaaagccagaggggcaagttatccaaggctgtgagagcccaccttttacatcagcatgacctagatgtgcaacaaggagtcaaaggggatcattttggaacttttaggtttaatgactgccttattggagtttggacttgcttggggcctgtggcccctttgttttggccaatttctttcatttggtatatttacccaatgtctacacccccaattgtacctaggaaacaactaacttgcttttgatttcacaggctcatagttggaagggacttgccttgtttcagataagactttggacttggacttttgggttaatgccagaatgagctaagactttgggggactgttggaaaggcatgatcatgttttgaaatgtgagaacatgagatttgggaggggcaaagggctgaatgacatggtttggctgtgtccccactcaaatctcatctcgaattttagttcccataattaccttgtattgtgggaggggcccagtgggagataattgaatcatgggggtggttaccctatgctgttatcatgttagtgagtgagttctcacaagatctgatggttttataagggacatttccccctttgcttggtacttctccttcctgccaccatgtgaagaaggatgtgtttgctgccccttccaccataattgtaagtttcctgaggcctcctgagccatgctaaactataagtcaattaaatctcttttttataaattactcagtcttggttatttcttcatagcagcatgataatggactaatacagatactataagcctaattttttagaagagcaaactgaggctctgagatgttaagcagctttccttctgtcacatagttggcaaatgtaagagtctggattggaattgagtcagtatggttacaaaacacttgttttcatttattatttatccacttaccaaaaaaaatggagtaactagaagcctcataaacactcatatgcgtctaaaacacaaactcacaaacctggtttccttggaaaatacatcatgagaatgtatcaaaaggtatgaaccagatttgctgttgctttatgacattgttaataatgggatggtgagagacaggatgaatcagggtctcagcttcatttcctggtttcaacagtgattcaaagagatgtcataggccttgcatattgcaagaaatatttgcttaagcaatacatttattattcataggtcagagcttggaaagcggcaggtgcacaggagcccttgacaatggcaaagcatgatcacatgtttaccgccaagacatagagccaaagtgggtgacttgtcagagtttgctttgagaaaagaagagctgatgtgcataatcagaaaccctctgttatggggcattctagtgctcagtgcctttgcactccttagctcagctcttactgctcaaagacaccctttagtgttctgaagggagaagttgtgaaactgtttctttaaaagttacaatgtgcaaaaatcatagtgacatttctattgcatttgcactttgcttcaacttctgttctggtcaaaatagatttgactttggagatacagaaatgcacagaattcatgtccttgagccagtagttacagtagaaaggtgtgtgtgtgtatatacatatatatatatatatatatgattggtgcaaaagtaattgcagttttgccattgaaagttatctagataaaagcttttttatatatatgtactactttatatataattttatctagaaaaaatatttatctagtatttttatctggtatttttatctagaaaaaatacttttatctagatgaaatttttttccttagtgatagtatactttacaaatttttctatcttcagctatcacccacccaagacttgaggaatcattctctgagtcaattgtaaaagcaattgataaggcaagatcctaaaacttctgggattttccatcaataaagtaacttttcagccttacagagcagagcttgttcctttatcttcatcagtttctacatttctttgtaaaaaatataactctgtaaaattagggctaaattccttgagaagaatttaaaacatataggtttcaaatattcaactaagcttcaaagaaagaagaaagaaacatgggctcacagagatgattttttttttctccagccagcatggtcatcatcccctgccaggcatctcagctttaaaagctctgcagcatgtctctatcctctttgacaacagcttctgtacaatataaaaatcccattatgcatattaagcaatgagactcactgtttcccaaggggatcagtttgaattaagctttctaattgagagatatttcccaaaggaccagttggcataattcatgtttcaaggctcctatgcaatttggccctctcccctttattaaaggaaaaagactatttatcttgattcacttacataatacatttcacagactatagcatatttcagaaatacaggttaaaagctaatcacaataaagtcatttctgaattttcctttctttcattttaaaaatacttttaagtaggaaaaggatccaagctgctcaagacttcattaaaatttgaacgttctaatttctaattagatttcttctgatcatgcttttacatgataaaagaagaacattatttatccagataataaataaagcccttgccatggctccacaatccctgagtcacatgaatcactattgttagaccatcgtgttttttaaaactgtgtgcacatatttctcagattattattttattttattgttccactgtctttataaaatatgacttactttattctatgctgtttgcatctatgaacacattttcttatttacaagttagtaccagatgtagcctatcagcctatctctgattcagaaaaatcttgctacctctaagtgcctgtgccagctaatatgtccttggggtatagcccctctctaccaggcactagatttagcttgttcgtttgaagttaagtgatagagcaaccagttgcatgtgtgtgtatatgtgtgtgtgtgtgtgtatgctgcgtgtgtgtatatgtgtgtatgtatacatctcaatggcatatggagctcatccaactgagaaagggctgaaactcccaagcagcatctggaatagctggccggctcatggagcttcggtttacagcagtcacctcttctacttcgcctgctggaacactcttactcagcttcgatcacctccatgagagattactgagtgcttcctaagcgtacacacacgcaccccagaaatgttgttacaattcacactccgttaacattacaaggtttccatccttattatgaagctatgcacctttattttacacaagcagataaaactgaaagagttcaggaaatgtcaccacaaagagcctcctttgatagatactccaaaaggaatgcaatattctagaatcctctccctgagaatctcattaaccaggtaagattaaactcctatcaccggagaggagactggaagttgaccccactcccagacagactttgtctcaggctatcacctattcttccgagggctcattcctctttccccaaaatcatttactctccccctaagttgcttacatccccctcccctctcccctatgaagaaggtgtataagctgcttgagctcacagtgttattgagcactcacttttctttcctatggtgtccttgagcatgtaaaaatttgcatatcttttttcctgttgatgtgcttgttgtcagtttgtttcatagactcagttattgaaccctccgaggatagatggaaggttttcccttttctacataactttacagacatttattagataaccacatgataaaagtcaaagctttggggaacattgtggatgaaaagggcagagaaagatcgcagtgagagaccagccgctttctcttaaaagttcacagcaggttacacccacagtggtgcagggctatagcggggagatctgtaaatcctcctttcatgaaaagggccttaggaagctgaatcgacaatgggcaaaatgaaaaaaaaatgcaagtgactaaaaagcaatcaatggacaatagaaagagaatgaatgagagtagcaggagaatacataccaaaaaaaaaaaataaaggaagaagaagaggtaggaaataggcagatattatgttccccaagtttaaaatacacaagcaaacaaaaaactaccttagaagcagggtgtcccaggattaacagcctgtaaaatctctgactgcagtgagaaagaaactctacttattgaagtctagaaaaactatacaatgtttaagtcttggtttggtgccccttccatctacccttcaatagcctctcctgcatctcgttacctctaaatgtccatgccttcctcctgaactactgttgttcagttccaaggaatgcaatagacaaagctcagggttgcatgacactcatgggtacaaggcatttggagaaagaatttttccacaataaaattattaacaatgtatttcctgtcgatgaaaggaagaaaattcttatttcctaagcaatttgggtttctcataaggccctttgaaaattaggtcttattaaaataaatctctgaccttggaagagcttgagtatgcttacctctgtcataataacataccctgagatatgctgccttccctgtggtcctcactgataatggatgctctaattagaagaaggacattgatcaaggcagagatgactcacagcagatttgtggtcactttcttctaaacaacagcctggttggagggtattatcataaaaactaaaaaatttaaaaaagcactttgggaggctgagatgggcagatcacagggtcaggagatcgagaccatcctggctaacacgatgaaaccccatctctactaaaaatacaaaaaattagccaggtgtggtggtgggcgcctgtagtcccagctactcaggtgggtgaggcaggagaatggtgtgaacccgggaggcagagcttgcagtgagctgagatcgtgccactgcactccagcctgggtgactgagagagactctgtctcaaaaaaaagtaaataaataaaagtaaaaaaaaaaaaaaaactcccaaactaatacttttattttcttttttagccattgtaaactaagattaggtggtagttgaaagatttgaaaaatgaaaatacgtgctgtaacatacattatatacaaattatatggagaatcagaaaacaaaaatattattaatttcctatccatttcccacaaatctattctgctatttgccattgtgttctttcctacgctacaaccacataagaaggcaaagcaaagagattgaattgagatttaagaaactaaaatcaagattctatgtcttaaaaaagtttagaaatatattgaataaaatgttcgtagcagttaattttaggaaatttgatcatagaagatttgtaatttactgtttatgtctatctcaattttaagttttcttcaagtaacacttattactggataaaaagatactgaaaaatatttgggtccaacacagtagctgacatacctgtaatcccagcactttgggaggccaagaggattgacttgagcccaggagttcaagaccagcctgggcaacacagggagaccctgtttctaccaaaaaaaattattactagctaaaatttatagtttggaaatgctctcctttaaatgaagaaatagataaattctaattcatttctttaatttaaaatttgagaatactgttttccagcaaataattaaaagtattagctattggaatttatttctcattataaaggcatctggaattgaatcttaactgttataattattacaactatttttaaaagcacatttttatcattcaagctttcatcatgctttacagatttagtaagctattgagctatatttatcttccgagtagttttagagtaattgctcccaaatttctctcatgagaggaatcacagaacatgagggaaaggagagcttattgaaacaaatagataaacagattgtcaggatttccaagtgaagaagttagaaatttgctttgtcttgttttaatacacttccagttgattcatatcagagatattgggaaacctattttagagtgcagtttttctaatattaggcaattttctaagtgtagtcacaattaatgcatatggaacaatggaccagcctttagaaatcttcctgatgatgaataatggagttattgcattcctgaagtacaggagtacatttttactcattcttttttttttggaactccaatattgtttttactctatctatactttctaaagctaacacaagcagctctaagcaaagaaactaactgccctttctttcttagtattactcctgatttcactgatgtgtaaattcaagcaaatattggggaaatcacagctgttccataggtcttatcctgcactttccattcatgaaccaatgtaatcaacaagaacattagcccaggaatattatgcctaattggtttgaaatgttgtgccctcttttggagatgtacatatataatttttataagatccacttgggctatgtatatgtagaagaagacagctttaatatgaatacaaccacaactacaaaatcgatcctcgtggccaagtaattaaccagataattcctttagcgtgacatcagtcaaatggttgtttgaatgtcccaaattttgcaactgattcatttttatgatgtggaagatgagaatgaaataattccctgtggggaaaaagacctacatcactggcccttcctatgttgtaggcgagagttaggtcaggtgtctgagatacgattgttgggcaactatcaatctggcaggattcatttcttcatccactgagggctgttcctatatttggaaatcctcactctcatcttcattagtgaattctaaagcattgagtgaaaatagcctgcaatacccctatttacagctttatagaagtgttaaaatatgcaagaactgggagtcttaaagagggaagccaaacggattctacaactaaatatgggagagacgttttatgatactgttgacttctttttaaagaatacattaaattttctttggaggctgcatttgcacagcaatgatttaaagatacttagctcacagtgatgaaataaatactttccccagtggtgtggaacaatttgatagaagagcatatgtcctctaattcgtgggcataatagagcctgaattaaggggctacaggagccctaagtgccgcttctcacatccttgctttgtgggagcatgtaatcttttcttagcgtatgttttattttgttatcttaattggagtttcttccttttcttggaggtcatttaacgtgggaatttgacactcagtcgtgcttaatttcactttcatatttttatcattgactttagtcgaattccttcagaaagctactgaaaccttggtccctttgccacctaaaaaaaaaaaaaaaaaaagaaactctactgccacatgggatgtttaaaattattaattacaccttttctgagagtccactcagtcaacgctccctccagctggagaagtgtgttctcattgaatgctcaactgcaagcgattgcgaacaaggtcaccatcttcaacagcatttcagtaagaaataaccaaaaccatagtaaatataaatgccgtgagaaatgacccttggcacatgctaacagatcattgctagtaagtaaacattggagagtaagcaacaacctgccaattcttatcttcctcgttggggaaaaggacaagtgactcactgtgttttatgtttttaaactttcaggtgtcttccttggcaaaaagaatataaaatcactaggatgatctttctctttgatggctttgtggctcagtgagggaacaagcatatacattatttaaatacaaatggattgataaatccacatatcgtgctagagctcagtgtgaggcaagcagctgtttgaaatcccaccctcctcttcccaatagttcatggtagaaaatccaagagactgcatacgaccaggtgtagccataatgtagtcctattagaaccatagcttcattgtcggaaacttcatttaaacgtccataaaaccatcctgatacaaagaatgaactgtaatagcttataattatgagagtgcataaagtatgcctcacaacctattacaaagccataattttagcataaaaccataaaccaggagaacaaaacttgaggacttcaaaataaaattacagcttttgtaaaggccaatagagcataccttttctctccgcaataaatgattgtctcgtctgcctcccacacgcaaaacaagggtggatttctgatttttcagactttacacttcagcacgttcccaaaggtatcttacaactagagcattaatacattttcaaaagggattttaatgcccattagaatgagatctggttcaggtggaaagacagatagtattcactcatgtcaaaatggggaaattagcagaaaaggcttttgtgcttggtctgcttaaaaaaccccctcctgtcatgaggaagaggaaatgcctgttttgatcatcaaaccaatgcaattaggactgaatgagatttatcagtctttatgtgagcagaaggaaatgaatatttaagaaatgtattttaggaaaatgaggatagtttcaaggccagaatatttaactctttgtcagcattcttgatgtatttttagggttttgtaaaagcactctggtttttttctcatagatgaaatacaatttgcctgacatcaacaagccaaagtgacttttatgcctaattatatattaaacatgcacacacacaccccttctaatttagaaagtcaaaatatgtgagcttcaacatgtacttttaaaatgtcatttgttattacgcttatgtgaataatatcgtacacaaagaacaaacttaaaatcccctataattccatcacaaagacataactctgcttaatattttggagtatttcttttgagtgtatattttcaaaacattgttaagctctctatatagttttatataatttattattcataaaacaacattgtaatcatttttatatcattaaatatctaacatactatttaatggttacataaaaccctattatataaattgactataatttatttaatccttcttatgtacaaacatttaaattattgtttacaattgttattggtacatgtagacacatatataggtatatacatatgtatataaaagctttacttctaatatcagaaaattataaacaataatcttaatgttcatataatctaaatctgtctactgtattattttggggtcaatttttatatttatttttatttatatatattttttattttttctgagacagggtctcactctgtcacccaggttgcagtgcagtggtgcgatcttgatctcagctcactgaaacctcttctttccaggctcaagcgatccttccacctcagattccgagtagttaggagcacaggcatgcaagaaaaattttttgtattttcggtagagatggggtctcatcatgttgcccaggctggtctcaagctcctgagctcaggtgatccatctgcctcagccttccaaagtgctgggattacaggcatgagctaccgtgcttggccttggagtcaatttttagaagtggagcaaaggataggaacatatttttagggatttatataaactattcaattacaatgagaaatttggagtgttttgtttatcacattgtttttcgaggatgatgagttagacatagaaataatagaattttctttataaaacttgatataatggtactgtatattgacaattgctttagaatcctttccattctgtgctgtctgcagtagaaaccacacctttgctcttatcctatgaggttcatatggccagtatctgaggagagggccaggccacccatggtgggaatgcagagaagacctaactgcatgagtatgaggagagataggtttataaacgggagcaggcgaaagttaagggaattcacacataatagtttctattctctcttgtaagaggcttgaagtgtaaatgtccggaactgtccatgtagggaagtagaaaactggacagagaacatgtcagtgaccaactgtattagtcagggttcttcaaagacacagaatcaatgggatataaatagatagaatgaaataaatttatgatgagggattggttcacacagttatggaggctgtttttagcctccatcatctgcccataatctgattatgtcccataatctgccgcctgtaagcggagccccggaaaagccagtctgagtccaaaggtctaagaactgggagcactgctgagaagagggatgtctcaactcaagcagacagcagatccgccctccctctaccattttgttttgtttaggccctcaatgggtgagatgaagcccacccacattgaggagagcagtcttctttactcatctactgattcaaatgctcatcttctccaggaacacccagaaataatggtttatcagctacccaggtattccttagctcaatcaagttgtcatataaaattaaccattgtataaaccttgccaagcagcactgaggttcaagctgaagttcaaaaccatactattgtaatagcatccacacaattatattttctctggtggtgattggctactcatgtgcaggatggattcaattatttaggtttgggaaactgcagggaatatgtgatagaaggccaaggtcagcaaggctcagtgaattggtgagaggaaacttgacgtgaagggggatagggcctaggtcgaataaggaacaaagtaagaatacaatggactcagtgaagagatgagtgaagggccaagggatgcaggtggtggatgagacccatgagcaagtgctataagaatgaggatgtgagagttagcactgtcgatcatatttcactgctataaatcattacatcacagtgtggatgaagggttgtatcataatagcttataagtggagaatgcagtgtgtcaattagattatacatttcttcagtcaacaaataactgatggacgttcaccatgtgctaggcactgctctgggccctagggatacaaaggtgaacaaaaaccgatacattccttgccttcatagagctgtagtctagcagaacaagggaagataaaacaataaacagaataaatacataaaatatgcatctgacctaagagatggcagctggtaacaagaaatcaaagagaaaactagaaggattaagtaagagatagtttgcagttttaagtagcatggacagggaagaagaataggaaaacttgattagcatgatgtgaaagaagaggcgataccatataagtaggttccaactcatgaatgcattgaatgtgtggctttccaagttgtcatctggattttgattagttggaactcagaggtttttttccccaaggagtaagatgagtgattgtgattggggacctaatcaatcctcatcccattccccaaagcttccttgactcataatgtgttggaaataccactttttgtaaccctgggcttcaagtcctttccagtttctctggccatcgagtctagaggtttcttgagtgctgaggaaagaaggaagtttggtgaatggttgaggctgggcatttcttattatttcatgccggaagaagccctagtcagcagaaaagtcaaaaaaaggaaggtaggaggtggagaatcttggcagcagtggcaccctttggaagcctgccctattgttttcccccaaaatccactgctcagggcctttcatttaggaaggacattagtcagaccactagtcatgctgtggtgtttgtcatattcagtatcatttctgcaacaaatgattgaacacctacaggcacctcttcagatgatcagtgaacaacaggcaaaatccttgccaggtgagcttacattctaccagggtagacagggaaataaataggcaacagaataaataaattatataggctgtgatgtaagaacaatgggttaggtagtcataagatctagtgagtgtcctgaaacttcatttatcctaaagggcctgagctttttcagttttcaccacttgaaggtatttttcatgtctgtaactgtagtagagaaagatagtttctggagatgttacctatatgtaagagggtggatctgtatattttgaattgagttttcatcctaaacttaaaaagtgattttgagtctgaggattctgaagagcagttttggctgtttttacatgctctggatgcccatgaaaacaattaagatggtttaataccgattttcaacttctaatctctccctggattgaaagaagaaagcaaatgccaagatgcatgacttcgacactattatagcaaacatgtcataatcactacattttcccaatggttttattactttaaatgtggtccccttttccagaaaagcagaatttctgagttatggcagttcgcccagtaatttgtaaacagtgcttaaatccctagttggccagtccgtacctgaaggaactgttcaattctacaaagtacataattgcggtataaatttattttttcactttctacagcacaaatgaactacttataataattattgtatttttttaaataataccaccactcagaaggaaattttatctgttgaattcccttctgagaggtaggtattttagaatatgcatgcaaaacaggataagcagaggaaatcttaacaccaatcaaaatatctcaggaatggcacaggaattctttttaaaccaaagtatttatgtgtctcaatattctgaagaatagttttcaatgtaaatgagctcttcagagtgaaaatttctgagaaactgcagataagatttcaaatagccgattacatcaatccaagggaaatttcatctgctcacagatatagctatgggatgtatttgcaagacagaacttagctgaacttgcatagctgtttcctggctctctttttatcctctaatttcttctagttttattagcttctcttcctcagcctgctccataatattgatatttcctgggtttgtttgctcatttatttattttaccattctctctttctattcacaattcttttgtgatttcatttaccatcatgacattcatagccacggtatctttagcctacacttttgtcctatgggacatgagggaacttcaaaaaattcattaaaaatgaaattaaaagataaaataaaaatataaaccttatttctcatcatatcattcaacaagtttaagacagttttgtaagcagtgatagcagccatttagtctatctctaaagaactgagattcctgggaatttaaccatgtcaatgcattctttttctcattactagctgaagaaaaatgggttccccttaaagattctttaagattaggaaacaaaaagaagttagaaggaggcaaatgaggactgtaaggtggatgcctgatggtttcccatcaaaactttcacaaaattgcccttgtttgatgagaggaatgagcaggagcactgtcatagtggaggaggactctctggtgatgttttcccaggtgcttttctgcgaaaactttggccaactttcttgaaacactctcataataagcagatgttatcattttggccctccagaaaattgacaagcaaaatgccttcagcatccccaaaaaactgttgccataaccttagctcttgagcagtttgcttttactttgacttgaccacatccacctcttggtagccattgctttgattatgctttgtcttcaggatcatactggtgaagccatgtttcatctcctattaaattcttcaaataaatgcttcaagatcttgataccacttgcttaaaatttccattgagagctctattcttgtctatagctgatctgggcacaacagttttggcacccatcaactggaaaatttgctccattttaatttttaaatcggaaatgtgtaagctgaacaaattgagatgtctgtggtgttggctattgtttctgctgttaattgttgatcaccatcaattagaacacgaaccagatgaattttttccttacaaattgatgtggatgctctaccgctagaggcttcatcttcaacatcatctcataccatcttaaaatgagttatccatttgtaaactgcttatttctttggggcattgtcccataaacttcttgtaaagcatcagtgattttcatcattcttccacctaagctccatcataaatttgatgtttgttcttccttcaattttagcagaatttatgttactcatataggagctcttttcaaacagatgtcttctccttcttagtgactcaaactagattgtgttcatatttgttataataagttaatgtgagtttattttggtgcaaacaattgaaatccttgcgtaattctttctcataataagcactttccatgaactctttgaacgaccgttgtaatttaaactgcgtttggatttctacctaaagtagggtaataaagtatcccagtttgcctgaaactcccagttctgcatcctgggaaagtttctcttccagatgtgaagaatccaggctttgggggataggcatggaagtttgggagaaaggtacaaaacccatcagcaccttcaaacataggggctgaaggcaacactatttttagtgtcaaattgataatggcacacattatccaccttccattgctgcagtcactgtttttccccaaccactggcgctggcaactgtaatttggggctaacaataatagctaattaactgttgattttcttcaagtgatgcatcctaaatgggcaacttaagtagattgcaatcatgattattaacaatctgtctttgagttggccagtagattaatttttgagttgtattaagatagagaagttttaagttgttaaatgttaaatatcataaatatcactttaagagagatatgccattgactttaccccacggatatcaatgatatatttaaataaggaaaaaagttctcagaggattgggagagaataacttctatccattggagatgtatttgtggatatgctagtagtggaatagggttagtttatttgcctcactcgattttggatgaaaacaaatgggatctgaatttccgtgagattaatatattcctttaactacatcctagttctgtgtgactgtaagcctcagaagatcaaaatggcaactatttaaccagcaatatctgtggttaattttcatgatgaacaagacaaatgtgaaaaaatgccacggaaaatggtattatgtttaatggtttagatttagaagtattttcatttaagtagcatgtggcattgaacttaatttatataaaaatatgagtgaaatttatgttttacttctacaggcggttacattttgactgagggagatgcttttgcagtgctgttccttggggccttgctactactaaatgaatatctgccatatatttcgagatttttctatgctttgatttaccatggatggtttgtgtaaataattttcaaattctaaataccaacataggagagccttatccagagctggttaaatatttaagaaccagctctcaaaactctatgtgtgtttatatataaattttactgatattagaatgtataccaataacttataaataataataaaatacacaatgctatttatcataaattctatatagccaattgagtcttgctatattctagctatatgaacattttttcctgatttttgctaaatttgtatatctgtatccagcttatagttgaaatttgaacatagttttataaataaagttgcatcctaatcccctaatttttttttcaaaaaaattgttgtaattaaatttgtgggctactttaaaactttcccattcttatgcaaattatattcattaaactaaaacctcttttagcttcagcacttgacatggtgcacttttaagttaaatctgaattattaacatttcttcatcactttcttaagtgatgaagaaaatgtttcattttgaggaaaaggattgttttgctcgacaatcacatgaacctctgttagcgtttatagatgtagatttacaaggggtaaatattcccatgattgccagttaccatttactaacataatgtcactcagtgcagttaaaagagatgcacagtagcacatcattgtatgacatttttagtatatggatatagtagatgtaaaactgtaaggcataggtaatagtaaaatacagtgaaataattagttttactattatatttactatgtatttttaatatttacttttattttaatataagatatttaattgtaagtttgtgtaattcaattttttcataatggctgtgtttaacaataggcttgcaacattcctgaaaatttaacagttggctcttgtgagccaatacaaacttgctccagaacattattggcctaatctgaagaggcttatttaatctgaagaggcttataaataaaaatgccccacttccaagcacctccatcactaccactccatccaggctactggccttcctttctagaattatggcttagcctccactctgtccttctggctcgcactttggcccattggtccacttcccacactacagacagagtgatccttttaatggatatactggatcatagcacttttcttttcttttcttttcttttcttttcttttcttttcttttcttttcttttcttttcttttcttttcttttctttttgagacagagtcttactctcttgcccagggtggagtgcagtggcacaatcacagctcactgcagcctcgactccagtgatcctcccacctcagcctcctgggtagttgggactatagccacgtgacaccatgcctggctaatttttttgtttttgcagggatagggtttcaccatgttgcccaaactagtcttgaactcttgggctcaagagatccacccccctgggcctcccaaatttcttggattacaggcatgagccactgagcccagcctccttttatcaaagttctttattgtcttcctttcttactcagaattgaactcaacattcttgtcaccattgcctctttgacatagctctaatgacctctgcattctgtttcctactaattccccaccattttgctctcatctgttttgccttcttgggattcttctcacacatcagagaacctgcctcagtgcattttgtactttgctttcttggcctggcatgcagggacctccaacttgcacactccttaaattgcctgctctccaacctaatgttactttctcaaagagacctccctgcctatccaagtcagagcacactcaaaaactctagactgcctgttttctttccccatactctacatctcattgctcttcatagcatggttcagaacctaccatgttaattttccatctccccaacaagaacatagatttcatgaaagaaaggactttgctttattcatcgtggatctccagagcctaaaaaactatctgacatagataactgataaatattcattaaattcatgcatggatccttattagaattgactctgaactgtgttcactttaggtgaattccatcactgtttctctcagcatgagggtggttcagtggcaagaaggtgtcaagtccaactcataaagtgaggctgtgttcattcagaggggtaccgctttctaattctcacaaaggcacaatatgagctggtgacagtcctaatttcatcctattgacagatataattttatgtctttaatgtcttcctcattgcaccccaaatcttctagtggtttggaacaacttatatatgctattctcttctcttggggacacatggatatgactaagtaaccatatcatacttgtatgcagggtgagtctgtgtgtaaccaaaagttgaaaacatcggctgggcacggttgctcaggactgtaatcccagcactttgggaggtcgaggcgggtggatcacctaaggtcaagagtttgagaccagcctgaccaatatggcaaaaccccgtctctattaaaattacaaaaattagccgggcatggtagcatgcacctgtagtcccagctacttgggaggctgatcgcgccactgcactccagcctgggcgacagagtgagactccgtctcaaaaaaaaaaaaaaaaaaaattgaaaacatatttgaagagattggtacattgccaatactaaagaaaagggaataagtgaaagaagttaagcaaggtcataacatataaagaatattaagtgaaatataaaaagaaatcaagtcaaatgtttttccctagcacgaccccaagacaaaattaggtctaaagacatagaaagcaattaaaactcattgtagtgactgtgctcatagaatatttgtaaacagcctatttcctttaggcctcagtttcattacctgtgaagcaggcattgtagtattgatctcctcagaaagagttataaaaatcagatactgtctgaaaactggtattgttattatgattatgattatgattatgattatttttgagatagagtttctctttgctgcctaggctggagtgcagtggtacaatcacagctcacagcagcctccactcaactggactcaactggactcaactgattctccaacttcagcctcccaagtagctgggaccacaggtgcatgctaccacctggctaactttttttatatttgtagagacaaggtgtcactgtggtggccaggctggtttggaactcctgacttcaagtgatccttcctcctcagcctcccaaagtgctgggattacaggcatgagccactgtacctggtcctgaaaattagtattattaaccttaaggatatgtttcataaattcatttaaatatttattaagtgggcatttttatgaaagggaaagtttactttagactttaacaatgcttgttttggtcttcacattttctttttctttttctttccttttctttttttttttttgagatggagtcttgctctgtcgcccaggctggagtgcaatggtgtgattttggatcactgcaacctctgcctcctgggttcaagcaattctcctgcctcagtctcccaagtagctgggattacaggcgcccaccaccatggctgactgatttttgtattttttagtagagacggggtttcaccatgttggtcaggctggtctcaaactcctgacctcaggtaatccacccacctcggcctcccagagtgctgggattacaggcgtgaacaaccatgctcaacccgacattttcattattaacaattatttcttaaagatcacttaagaaaatgtgagttttttttcagagaataagtatgttcatacttctagatgtattctccatttatgttttacccacaatatgaaagtcacctatgcttaacaatttccaaagacagcttgatgtttccaagaagtccccttttaagtgtggcctgtaagaccttgcccaggtggcttatctgatggtcttggcgagactctggcctgggcagtaattctggctctaacatttctgcttgaagcacaaagaaactgtaggctcatttcccagaggatgggggaagttgtagctctaactgtttaaaattggattttattgggtaatgtttcaaagcgctcactttgcatttctgcttacaaagctgaacattcagccaaaatattggaaaggaaatactcaggcagaatgaaacgactgaggaggcttgaaaagtggggagccgagccaagaatgacaaaataaaaggggcacattccagaaggagacgtgaaagagaaaactgtttttagcacatcagttagagccttcttttcccacatccatatccaaaccttgggaataactaatgttttagttgggtttttagcttttcttctcatatactcacttcaaatctcatgctaacacattaaagaaggctttgccggcccatctggggcaacccaagcctttaattcaagttggcttttaccatttcatggcaggtgccaaggatggaggtcacgtgaaggttttctaccctccactctggaaacatgaaataaaattactttagcattgatgcaatgaacaaatattcctgtcagatgcgatcaccatctgagacacaagtctgggaagtattttacatcccataacatgactttgagggtgagcacatgtatttgtttatctcccatgaaggcaactttatttatacgctattgatttttttgtgaactattctgctccttgaaaaactccatttatttgattataggaagcaaatctcccccacactaccagagtggattatttagaaatggctgagagcaaccatagagacagctcaagaagctagtctacaaaggcaggtcaggaggcagcacagaactgaatggaagtgcgttgcactgggcagacagagaggtttggatgaactgacttcagtgaggtttcccacttgggaaattttgctgatagtgactcacttgtgctcctaattctcccactttatctgtttgtgtggggtgtgtatatgtgtgctcacgaacactcatatgtgtatatgcatgcatttctcttataaagccatctttaataattacaaccatcttcccacctttgagaagattccaaactacattcagaagaagcaaacagtttttgaggtgttacctccatcataccaagaggatggatttcaaatctttttgcagtcacttggagagagttgacttcttttgcaagtctcttgcattgttaaatatcccacagaaatgaaacttgaaagggtaaaagcagaaatgatcctttgtgcttaagacactgaagaaaataaattgtatggaaacaataaatgattaatttgaaaacaaagcaacgactttttctttttctctcagatatggtagcatctccaagtggtttctgtggaggaactatatttcagagaatatgaattcacagactgtacaaggtgattatttttaatgcatctatctatcttgaattatcataaagtcatagaatgtaaaaggaacttgattatctagtaaagttcttattctttattttgcttcttttagaaacaaaaaccacttgtcatttactaaaatatcttcagataaagaaactagatattgctcttggaaacaataatgcagccttttgtaatgtcttcaagtcagtacacatttattgcgaaattaaactgtgctggggacacaaaaatcaaattagacattttcttatttatgtatgcattcatttaaaatatttattggctgtctacaatgtgccagaatggttttgaggcaataggggtacaggagtgaaaaaggtagacctagttgctgccttcatgaaaattatagtacattggagaaaaaggacattaaaaatataatataatgacaggcagtgaaaagtgctgtgattacaaataaagcggaatgagggggttaagagtgatggagacagactcctattttagataggatggtccaggtaggtctctctggcaagatgacatttaaacagagatctgaatgtgatgagaaacagaagacattctagggagaggaaacggaataagggagggggagagaccaaggatagttcccataaccagtggttctgtgtggatagaagttgaagtcatgcaaaattacagaagtagagacaggaaagggatgtgggagaatatttgtagggcttgtaaactgcactgaagagtttagatttttcctaaaatccaaaaggcagtgtagaattgaagaagtctagggagagataagaccaagccagggcagttagctggttactctgacagtagtatgaagattaggaagagtaaaggaacatcgtgcattcattttatatggtacaaagcagaggtcttcagacatttttgttcttttctccccaaaaaagtaattttgaacaatatgtaaacaaattttatagtgattttaaatactgccaaatatataatttccaacatcctcaaaatattggcatttaaaagtaattattttactcaattaaaatatgcagtagaatataaacgccagtgtgatttgatttccaccaacatccatttaaaaatacacactaagttgtttttcactctttttatattatcacctttctctttgaacttcttccaccataattttaccataaagtgtttttatgatttggagatgttttatagataactgtcatatgttgtgcaacacacatgcacatgcacacacatgcacacacatacacaaacacactgtttataatatgcattaattttagttttctgtgaccaaaatgatttcaattgaaaaaacttcttctggattaagtgactattacattgtttattagtacacgattcatcaagcaacataaaccaacgatagtatgagtaataatagcatcaatcccccacatggtccttatcacatggcagccactgctcctcatgctgcccttattttccttttcttttttttttttttgagacagagtctccctctgtcaccaggctggagtgcagtggcacaatctcggctgactgcaacctctgcctccagggttcaagcgattcttctgcctcagcctcccgagtagttgggactacaggtacatgccaccacacccaactaatttttgtatttttagtggagatggggtttcaccatggtggccaggatggtctcaatctcctgacctcatgatctgcccgcctcggtctcccaaagtgctgggatttcaggcgtgagccatcgtgcctggcctattaattaactgaaatcctcacaaccaccccatgaggcagctcagaaatcttgttcagagaaataaggaggtgggaatggagagacttctgccagagcaatgtctttgaaactcttcagtgccacatgccaaaatcaaacagcaaactgtcatcaaagagtatctttaacaatctattagccaattcaattagttactcctttaatgtttgataggaaaatatttgaaagtgctcaacctgctaaaagatttgttacatgggaaccatggttaccaatcacaggggagtcattatacccgtgacaaggcactgcagacgactcagggggttgagaggttggccttttctttgctaagggagggaagggcaattcaccaagtagatagctgaaatattctactttctcaagaagatagattttagggaagatgactacggaagctgaagatgtagaaaccaactcccttaaacaccttactgctcttgtttctctcagaaagcctttctgtactaccagggcgatgtgtactcaatcctcagacacctggttaatcccagtctcttccattgcccctttgccagggccttcttggaaggcttactcaatgttcctccaaactatcctttctggtgcttttcttgtccttaagacaatttgcaaccttttaaaactttgctctgcacaatttaggcaattgagttcctaggacattaaatggctctctcatgccatgacttgaaactggagacctgatttttattatattgatcagctcttttaatgatgttcaatcattgacaggttaatttatgttttttttaaattagaacatcaatacattttttttgtcactgcaaaacagcaatcgtcacattttaaaagggaacaaactgtgagtaaatgtgggtgatggtggggggcatttctgaaatcattgtgaatgtagctgctatttagtatcttatcagccaagaagcaaatttttaaaaattgcaataaagaaaacagactttcctatttctacctttggaattctagaaccatttcaaaatcatattgataaaaaataacttatttaaatttcaacagcctacattcctactagaagacacatatttcttgaaggatacatcttgatatatgaatttatatatagaaggtttcagagcttgctggttgaatgatctgttggaacatgaccatttttattaaactgccatattttaagttatccaacagttatgtttatagtgtaaaatctcattggggactttacatgtttccacaggtcgagtggtagaaaattgattgccgttgtttcatttgacaaattcttggatctttacatattttcttgcatttactcatcactaggaaatggactgttgttacttgccaggcctttgctgagagaaggaaacagagtccttttgaaagctctgggtgatgtttgtgaatatttaatcatggagaaggtacaatggcctcatttacagtgatacatcaaaattaatttcatggtattttgtcaaggaaagactcttaaccatatgccttcaaataaaaataaattagttgcaaaactctgacaaggaatttatctaattctgcaaagtctttggatgcaagatttccttaaacaaaaatagaatcattcatgcaaacatgattgagttcaatttatttctgttgttcaaaaggaatcagaaaaaaaagcatttctgtcttctgatgcttccaaactcaaactgagtgtctttaattgagtctcatgtttttattagaaatacattaaatgcaaaattaagtagaaagagagagaaccacacaaacatagaaggatgttaaatacttggattggagacaaagtgagcagatccttcaagtacaacatccatttcctggacccagaacaacactgtatattactgagtcactcaacccatctttaaaggcaatctcagagaaaagagcctagctccgtctgaactcacggaacattaatcaatgctgaataataaacctcactgcgtggttcagtaaacatatggactaaaagtggtttcatggatgaatttcttgtacacattttattttttgccatgtgatgttttaaaatcatgtatacagtcaaatttatcagtttttgaaattgtacttggattttcttgaacttagattctaaagaaatttactcacggtttcttctagtacttgtatggtttcatgttttgcacatttggagtgtattttatgaacatagtgaatctgaggttacatttttccaaatagctatccagtttcctccacaccatttattaaaaagaacatttttttctcattgctttgagatggcaccttaattgcttctaaatttccacaaacaggcttgagtctgtttctgcgtattctatgctgtttctctggtatgtctgtctaggtatgctctagtatcactgttttaattatagagcctttacaggatggtttcacgctggatggggctagtcccttcctcacttctttttttttttcaaggtgttcttagatatttctgcatgtttctttaggaggattcaatcataggggtaaagtatcagaatttctgtacctaactcccaaataaatacatgtaaatgtatacatacagagagagatgaagcaaatgtggcagaatggtgtcaagtgatggctcactgaagggcatatgggtgtttatagaattcttgcaacttttctcatgctttaaaaaatttcaaaataaaatgttgggagaaaatcaaagaaaaaagttggagagaagttaaagtggttaccatttatgctttggaagagggtggacagacatgggagtgggaaagtggctcttcagcgtgtactttaaaataatatttaggctgggcacagtggctcactcctgtaatcccagcactttgggaggcctaggcaggtggatcacctgaggttaggagttcgagactagcctggccaacatagtgaaactccgtctgtactaaaaatacaaaattagctgggcgtggtagcatgcacctgtagtcctagctactctggaggctgaggtaggagaatcacttgaacccgggaggcaaatgttgcagtgagctgagatggagccactgcactctagcgtgggtgatagagtgagactccatctcagaaaaaaatatatatataaaagaaataatattttgttttattttgagcaatctaaatgtatcagtgattcaaaggaaaacataaatcaagtgaaaattaatataattacctcaaaatatggaagctatgaaatgaatttcaggctaatatcaaatttggccagtgttagaattgggaaatttaaacggtgtcataaaattcttgaggaataacacacactgggacctttcactggacagagggtggtagaagggagaagatcaagaagaataactaatgggtactaggcttaccacctgggtgatgaaataatctgtacaacaaacccccatgacacaagtttacctatgtaatcaacctgcacttgtacccctgaacttaaaatagaagttaaaaaaatagaaattcgtgtacataagttataagttataaaaataaaattcttgaggatggatgagccaagggagttcttctgggggtctgcctcttcctggtccagggacctactggttgagaggagctgggagccaggtggcatctcactcccagaggaggcatccctggaaacttagaaaactttttcatctagagatgacaattctgactccttttcccactttcatccttctctttcccactctctagagatttctgtatttattaaaggccaaccaacttccatcaggtggagtcctgtgtaccatgtgtccttgtggtggagttgacgcatgcatatgcacatttgcacacctccaacatcacttctgtctttgttccacttttcaaagcagacattctgaggagagggggcaagaaatccttcctagttgtcaagctagctggcactactgctctctctcagctaggtttttttttttttttcctccctggaattctattgtcttgcttcttattcttcatctgattacagctctccttcattcaggtctcaggatagacttcacttgttctgaaaatttggtctatatttttcaagatcttgttatctgttctttccatgtactcctatagtccttgggataaggacagcataggacattttgtggtgtgttgtaattacctaatgatgcctaacatttactgagcactcactatatgctcagggcttaaatgtactatttgatttccacatcaatcccatgaggtaggagacactttgacctgtattttacagaagaggaaagtcggcttagagaaacgtagtcacttgttgtgacgggcagtctttagggtggcctccaatgatccccaccttctggcattcacagtcttgtgtagtccccttcccttgaaagtggggctagtaactttctcctagacaacagaatacagagaaagtggttaaatgtcacttctgtgatttgattatagaggactgtgacatgtatcttggtggcagagtctctctaatgctttctgagcttgtaccctttgataaaacaagagagtatgttggaaaggctcatatggcaagggactgggggtgccctctggctaactgcaaccgagatcctcagtccaacgatcctcaagacttgaatactgtcaacaactgcacgagtaaactcagaagtagatgcctctgctgttgaaactgcagatgagactttactcttgtgtatgattgtagctttgtgagagacctcaagaaagagggctcagttaagctatgcccagattcctcactcagaaactgtgagataataaatttgtgttgtattaagctgctgcattttggagaaaaggcagataactttgggtaactgatagataacttagcaatagattgctagcaatagacaactaatacacttgacttagatcccacaggtagaaagagtacagggttaaaatccagggcctctgattccctcaatgaatacttatgtcatgctgcctggttacttaccaattattattattattttcatttcaaacttgttctgactttaattcctggcatttagcctgaatctggtattttgtgcgtccttgacagttatgaaatgaaaagtgggtccatgaaacacaaaatattgtatggtaaattagccaatcaaagcaacatttttaaactttgtatttcttaaaattgagaaaagagagtccgggcatggtggctcatgcctgtaatcccagcattttgggaggccaaggcggggggatcacgaggtcaggagatcgagaccatcctggctaacacagtgaaaccccttctctactaaaaatacaaaaaaattagccaggtgtggtggcgggcgcctgtagtcccagctactcgggaggctgaggcaggagaatggcatgaacctgggaggcagagcttgcagtgagccaagatcgcgccactgcactccagcctgggtgacagagcgggactccgtttcaaaaataaaaaaaaaataaaaatcgagaaaagagaagagctacacatagcacaattattcttggaactattttgcacttctgtgtgctgactgttatgttaggttgcatggttaattttaacatctctctacactagaacatggattgggtaccacacttgggccctgatttgaaattaattactttatcaaacatttgttaaacaactttgaaatttctgcctatgtgccaagcccttgaaacacaaagctgggtaaaacagtgtaagggcaaggacaaatacagatagtgacatcattgcatgatctgataagtgatttaatcacaatttgaacaaagaactgtgggaataaaatacagaggataaccttccttcagtggtctccctgtttctttctctctcattttctctgtctacacacatgtgcacactaacacatgtattgatatcattccggctaattcagaaaatcataaatgttcactcaagagagttaagattttactcaatgattgtaattgtaaagtgactatgagaaaaagttcaagtgaaaggacttggctgatctgaagtagggtgttatcaattttaatgaatcattgagcaacaggtttagagaggacattaaaagagatgacacacaaatataaaccagagaattgccaattgaagggaacaaccagaaatgcaatttaaagtggtgttcttttgatgttcaaagtaacttttggtgatttttacacacagagaaaaagaaaacattttttccctactcaaggtactgccatacaaaataatcaaaaggaaaaagtatcacttttaggtagccattttctacacctcaatcagattaaaggtctatttttcatcggtttacttagagtgaatttgcactgctgcatggtgttgttagtctttgttggataccataaggtgtctcccaagaacttaggaataatgaaaataaaattgttccctgagagctaaactatgagccaaacaaataataaataaaagtagagaatcacagttaccttaaatagacaaaagagctcccaggactgcaagacttgattgtaacctgcctgaatgtattagagtactaagaaagaatatagtctcaactgatgtctgcacagccatgggaagataagggaaaagaaagtctcagagcaatatgggcatgccatttatgcatggtcctggctagggagtaagagcatccttttgagtaggatatgtctagctcttacacatcagattaatctcccaaatccttgttgtgttctctttacatgatcaggaaggaaatctccaattgtgatctggcttcctgcaggggttaaggtaaacaaggcagaccctgagaagaggcgaaggcagaaagtatcagttggttgaagaaagatagtatcagttgttgaagaaagaatagaaagcatgggccaggccgggtggctcacacctataatcccagcactttggtaggctgaggcaggtggatcacgaggtcaggagatcgagaccatcctggccaatatggtgaaaccccgtctctactaaaaatacaaaaattagctgggcgtggtggcacgtgcctgtagttccagctactcgggaggctgaggcaggagaatcgcttgaacctgggaggcagagctggcagtgagcagagattgcaccactgcacttcagcctggcgacagagcatgactccatctcaaagaaaaaagaatagaaagcatgagtagtgattacagacataaatttcagtagcccactgaagaaatattctgtgatttaatgtcagtctttttaaagtcacaatttacagcaacctttttctcccttagaatttaaacatgcttaatcccgtttcatctcaaacaataaaataaaagagacatgccacctccactttttccaacacccctttcctgagttccagctaacactgtgaaagcaaggtgtatgtttcttaagtattcatttaagttcttgggtttatttacatattgtttctccctggcattaatcagagtattgtttgaattttccaacggtatttcagttacactctgttgattcaaaagaaggttgtttgtccaagcttgtccaagtcagtttcaagaggctcagccaccaaaagtttcatcaaagaggaagccaaggtcatcagtaaagcctcacgagaggtaggatcacaggggtgaagtggacactcacgggtcctgccatccttggcatcaggaaagtctccattctggaccacctttgtctgtctgaacaattcctctcagattttagagtctggaaatttcctgagtagcttaagagaagataagagtcaaagtttccaaactgtagaaataacccaaatgcatggctccttttatttccacaaatttggccagagacatgacaatttgggcaactttgtgcaatgttttacatttaatgatttttatgacccaaactctgctaggcagaatagtataagcatttgtaatccgtactgaaataatccatctggcataaaatccaaatttcaaaattggatgagattgtgtgttctgggcctaccaagatagttattacacacatgagaactcaaaatactaaagctactggtagaaacaattgctcttctccttgctgtaaacatgaaagtgagaagcagcaaagaacgatcaacaaattaacacccttttcatattttttgtgacagctacctggaacgggcaggaaagaaaaatgcagataagaaaattaaaaccacagactcctgggcagcgaacaagagccttctgatcctaattcgatctggagttaagaatgaaggggatttctgtagcagtttcttttgcatagcagagctccgacttttccagcaacagcgtgtccctggaagctacacaaagtcctctttgattgcctgtgatcaaagccacgaaggctctcctgcaacatcttagcttcagaaagccaggaaaatcagaatgctgagagtatattaataattcctaaacatatttttaaggtgagtggtacttctaacagagcttcattattactaaaaatgatttgtttctgactttcctgttggggaaaaagttagccttaactttctgatgagcaagttgcatgttacagtggatattgaacaatatagtcagttgttttactcagaatttatgcagctgatcacatagggacaggactggatgatagaaagctcactagactggaagtcaggagaatcagctttgtcaccgatctaacgtagcatagtggacgtgtctaatagccttggcctcagcatctccatctgtgaaatgggctgaagggcttgagctctctgttacttctttgggatgtggtagttaagaaggctcccattggattccacatacccttgtttatagccatggctgaatcttcacaagactgccaaatcccaagctgcctcctcttctgtaccatttctgccacatttgggtctttatcagcaggagagtgcagacactttaatgtgaattcatgtgcagcatttgaccgaggattatttctactttttaaaaggcagcaagcaaaaacatgcaacttgatatatgggggtgggaaggatcatattttaaagtcagaagaactgcttatatatttcaactataaaatttattatctgtgtgaatttcattaaattatttaactcctctgagtctcaatttcttatctgtataataaaacctagtccgcatattgcaatgaagttaaaaagacagtctgtttatgaaaagtgtaaatttctatttaatatcaaaagtacgtaatctaaattgtgaagtctttattatttttactatttatttttatttatttatatatttcatgaatattagtagtagttgttatagaagagtattagtagtattagttgtagggacaagaaccaacaaactatttttttaatgatggcatttcatatacaatgaggaatcagggtagaagaattaattgaggagagggaagcatctttttgcggcaattaaaatatgtacaatcatacctaaactagtcaccctatttttagttccttctctcccttccttctctccctcccttccttcccttcctccctccctccctccctccctccctcattcctttattccttccttccttgctgtcttgctttctttctgaatatgtacctactctacatttgccaactccaactctggatgcattctaaaggaaagacaagccaaccacagggtagaaacatcaccctgagccagagctctgggtcaacagtgacgacaggaggcatctggtagggagaaaagatgtagcaattttacctggaactacaaagatttgagactcagaatcacgctgacatttggggacctagcaggggtgtatagacaaaatgtggcaccacatttgtcttgaactactgattgctgaggcagattttcttgtaaaggtaggacgccaagcagtatggtccaatctctccttgattttctgatgagggtcaatagaggagagaaggagagagaagaattgagagaagcaaaatttggagaccgttgaagagtcaggctctcttatagattctcagaagaaaaaagaaaacctgtgatactgatatatcaaataagagaggtttgatatattattagatatcaaattgatgtatctaataagataggtttgatattttcactctcgtccgtgtgaagagaccaccaaacaggctttgtgtgagcaataaagctttttaatcacctgggtgcaggcggactgagtccgaaaagagtcagcgaagggagataggggtggggccgttttataagatttgggtggatagtggaaaattacagtcaaagggggttgttcgctggcaggcagggacaggggtcacaaggtgctcagtgggggaccttttgagccaggatgagccaggagaaggaatttcacaaggtaatgtcatcagctaaggcatggaccagccattttcacttcttttgtgattcttcagttacttcaggccatctggatgtatacgtgcaggtcacaggggatatgatggcttagcttgggctcagaggcctgacagatacaacatttgattatatttgatatatcttatttgatatacctaataagatatatcaaataagatagataggttttaaataagattagttggcaagaaagctgcctcacaccacccctactgcagccttttgcacatttctgtccttagcttacctccctttcatctggtaataatggtggcactggaccttttttccagatcaccttcctttagctgcctcttggtccacttttccccttcaaggttgctcttgctgctaaaggtttaccatgactttatttctgtggatgggaatggggagtgagcgtgtgttattatggagccatctcttaatgatgtagtcctgggcccagggagaacttgcaattgcatgctccataagtccttctttatttcttccatgcacacagcagctttgctaatgcctctcagcctgacacacccagtcaatctgttacactcaagatggtttttactacaatgggagggaatctgcatatgtcctggtgggtactggtacatctgatttttacataggttgcaagtaatctgaccagtttgttaatgaccttctaatgtacatttgcattatgattgttcccattatttgccattccaattccacttacgggggttttctttcgagacgctagctgtctttcctacctgcctgtaacacattcacaaagttaatgaggacatgtgcgcatggcagtgggtgtcaccattttaattgcttccaaatatggttagcatatgttgtctcagtatagaaaatctgaattaaaatgctaagcctttttagtactggcaagagataatagtctctagagctagggctcttctgagaaattcatgacgtctccaaagtttccctctggttcaagaagatgctggtttttctgaaacagctcttatatacttttgatctccttggacttttaacgcttctgtagatagtgatttggtaacttccatgagataaggtcagagctagaatgggctgggacttgctttcattagtatgtgtctaagcacttggtccaggaatgatatccttaacagtagctttcctgttcagtcacttccccctaatttaactataagaacaaggaacttaattttgttgaggtcttacaaaaaattgtattctttgattatatgctgtgagcatgaaggatgtgtgaaaatactcaaaagagaacgtctgcttcttctttgcaagaagcttactatttcttggatgagaccaaatggccagaaaaaggagcttaacaatattgtacaaagtaaattcaaagaaaaaatatggccaggcacagtggctcacacctgtaatatcaacattttgagaggccgaggtgggaggatcactggaggccaggagtttgagaccagcctgagtaacatagtgagactcatatctctacaaaaaaaaattaaaaaaataaaaaattagtgagtgtggtggcatgtgcctgtagtgccaacttcttgggaggccgaggcaggaagattccttgagcccaggagttcaaggctacagtgaactaggatcgtgccactgcactccaactttggatgacagagtgaggccctgcctccaaaaaaataaaaagtatatgtaagtagtgcatctgttattgaacagtaccaggaaaggagatttcttaaatgattggagaaggtgggagtggaggactctgcttagaaatgctggacaagttcagatttgatatgacaggctgctctagttcctatttggagaacctgaaaaataatatgcacagcaccctatgctcttgtcagatgatatcatgccagaggcaagagctctttttctggtgagtgcatgcatgcatgtgtgtgtgttttgagtttgcaagctgtcttacttcatccatgtttagtggaaaagaatattggcccactgtgtaataacaattattaatagttaataacaattttataaaataaattatctagtgcgatgaaacaaaggatagtctcttcttcatgtataataaaatataatttgattgagaaacaaacccttcatctgcattgtacaaataggtgagaggtaattaatgggaagattttctttttctctctgggaaaatgaatcacatacttggcttccttggctgcctgtcaagaaaacaactctccacacgctgaaatatcttagaggcaaattggatgctcaagacagaagcctgtgacagaatcaatgttggactctccgcagatggggccagtgtagcaaagccctctggcatagatgggcttcatattactgttagctaccataaaattgtccctgtgaaaccacagaaaattttaccaactccctttagggcaagaaagagaaatgggaacaagaaacagaaaacaaatcactcactctgttctagagtataaaagcagatactggcaggctatttttaaaagttacctttaaaatcatccctttgctttattaaagaaagcagtctttgatttcatgtacaggtgtatgaaatatttttaggtaaacagtatgaagatctaagggaaaagtctgtgtgcctcagaagaggtaatggtgtgtgcaattggattattggatgttctgtgcccttgtataatatatatataatatatagttatgtagatcatatgtacgttgagcaaaactacctggatctgaacatatggaaatctctatgatccagtaagaggtattgggatcctttttcttaaggagaaaaatccttcaaagttaggtatcctttactaggcaggcagactcattaccaaaactgcagtatgcggaccagtcttgggtgtttgaaacttggctttgatacggtgacaactctgtgtgtaaattactctgcatagtaaaatattctaacctctcctgcatagtaaaataccaatcagcaatgaagacagattacagctggaacaaatgcagttagtgaacttggatttttccatactaatgaagttaaacagaaaaataaataaatacaacaataggaaagtccaaaataactcatgtgtgggtggctttatgtacttggagatcgatgcttacacatatgcgtcatgcctacaaagactgaggtcccaagcaggagatcaagaatatggaaggaaaaactaaacttcctatagaaaatgcatgtaaaacaggttttagagccaaataatcacgtgttcaaatcctggttcctactatttagttgagttacacagtatttcagatcatgaaagcataatttcctcacttacgaaatgaggagtaatcctcgccctgggatttctgtgaggaataaatacaaaatcacacatctgacacagaggggtgtgattgtcatttcaatgtgtcaacttgaccaggcgacagtacccagtcattcaattaagcactaacctgggtgttgctggcaaggtattttgtagaccttgttagcatctgcaatctgttcactttcagtaaagcagattattttccataatctgggtgggcctgattcaaccagttgaaaggatgtaaaggtagaactgaggtttacctgggggacaggaaattctccctgtggactgcagcatcagcttcagcctgggagtctccattctctcttttttaatggcctgccctatcgatttcagacttatctagtctccacagtcatgtaggccaattctttgtactctatctatatatctaaatctatctagctagctacctagctagctattatctatctatcttggttatatgtttctttcatggaatgctgactaatacaagtaagaatcttaaaatgttattttctgtataatccaaatttgagggttcatatttgaatacacaaattctatatttctatcagattgtagtgatggataaaaacaaatatttgtcttctgctcacctcctttaaactagaggagaaagaaagtgtgcctggaagttctcaagtcttttcctgttagtatattaatatggattcatttatttgaagcatgatcatcccacacttagaaagcctagccttgaggaaatcaggcataaggcagattaattgccctggctgaaaagggaaagggagaacttagggatgagaacatcagcatcaacatcaacatggaacaccatttatcatgtgccaggcactgttcttaatagttaactaacaggcattcacttatttcatcttcatggtaaccctaacaggtgaataccactatcattctcacattccaggtgggggatctgaggcatgaggtttaaattgcttgtcctggaatgtggtaaagtcatagcggccaccgcaaaacatcgctccagagagtcaatagagtggaagctcctttgggtgcctctttacatggagagatgggaggcaggtggaagagtgcaatcccgtagagcatggagcatccacaggagccctctgatatggaatgagaactggaggagagaaatcaaaaaataggaagagcttagggcaaggaatctgaaaacaggactattagataaaatgtcagtgtagggacaacgtcttggtcttctggtctccagaatttaactcagtgcctggaaagtagaatatatcccaaaaacctgtcatgaattgagtaaaaaggttcggataacattttaccaggagctggcttaggtattagggttagaagagaaatgcaaagcatatttttactgtctgtgattgaggccatggttattaaggttgtctggcttataaaaacctcttaaagaatgcaaaaaacatttttgagttatttaagtggatgcctcaaagaacattgagggaaatttttattacgaggatgtgatatttaaaataaacgggccgggcgcggtggctcacgcctgtaatcccagcactttgggaggccgaggcgggcggatcacaaagtcaggagatcgagttcaacctggctaacacggtgaaaccccgtctctactaaaaatacaaaaaatttgtgtggtgtagtggcgggcgcctgcagccccagctactcgggaggctgaggcaggagaatggcgtgaaccggggaggcagagcttgcagtgagccgagatggtgccactgcactccagcctgggcaacagagcgagactccatctcaaaaaagaaaaaataatgacaataataatgctgcgcccagcacggtcagctaatgccacatggtaattgctgcgtgtgtgagtagcaaaatcacatggaagaagagctggccttggggacaatgccacgttacagtgaggagctccagaaaaacccagtagaaatttctcaggttcacgcctgggtgcccatcctctccctgatcccacaaaagaataaagatcttacaaatatccaatgaataccaggatggaaataacttgtttcctggcattcaagacagaggaaatccttactattaaaaacaaaaaacaaaaaacaaaaaaacaaaaaaaactagaaatgattagcaaagacatgaaacacaacagtttaaaaaaataaaaaaaataaactagaaaattctatcatatttgttcgttttagtttgccacttgaaatacaaaccagtggccgggcgcggtggctcacacctgtaatcccagcactttgggaggccgaggtgggcggatcgtctgagctcaggaattgcagaccagcctggccaacatggtgaaaccccatctctactaaaaacatacaaaaaattagctgggtgtggtggcaggtgcctgtaatcccagctacttggaaggctgaggcaggagacttgcttgaacctgggaggcagaggttgcagtgagccaagatcgcaccattgcactccagcctgggcaacaagattgagactccatctcaatataaaaaataaaaataaattaaaaaatttaaaaaaaaagaaatgcgaaccagtgactgaaatgtatatttcccaaccagggactgttccaatatcacatttaaaaggggttggtggcctcatttcaattcccatcacatacattgttctaattggtaaatccctgcagacaaagcaggagctccaaaatcagggtagaaggtttccttcaacttctcagattaactattttggtaaacagcatacatatttctcacatagtgctaatattataatggccaacctccagatttaagtgcatcaattaagtaaactacactacttctgtgaataaaagatgtttgttttactaaatctgccaatttaattaactagcacaatttcctatatatagaaaatttgaaacacaaacagtgacttcttctatgactaaattttttcctaataaatacctgcttaaaagattgtcggcatgaggatagcattatttttttaagttctttctcaaagaagccagtcaatcaagagcttatcgagtgtgtaccagataatcaatttttcccccagaggacttaactttaagcagggtttttcaacttctgcattaatgatattttgggttgaaaaattttatactgtggaagacagtcctatgtttttgaatttttagcaacattcctggcctctacccattaatgccaatactaccccttcctcagttgtaatcttaagtgtgtccagacatttccatatccctaattggcaaaattactcccagttgagggatgctgctttatattcttgaaatagattgcattagacagcgtaggctatctatgacaagtatttctcagatcttagcttgagataatagaaatttatcttttgctctaatcagagaacagtgaaggtcatgaaggtgggaaggggtagcatgttccatgttagagatcttccacctttcagctactggagccacattccattggccagaatttagtcatccatgcccacctaaatgcaaggaaaaccgtgaaatatagtctcattgcatgccaaagaggaaaacaaactaagatttgggaaataacatcaagtctctgccacagggtgtgttagtctgttctcgcgctgttaataaagacatactcgagactgggtaatttataaagaaaagaggtttaatggactcacagttccacatggatggggagccctcacaaccatggcagaaggtgaatgaggagcaaagtcacgtcttccatggtggtgggtaagagagcttgtatagaggaactcccctttataaaaccatcagctcttatgagacttactatcatgagaacagcacgggaaagacctgcccccaaaattcaattacctccattgggtccctcccccgacatatgggaattatgggagttgcaattcaagatgagatttgggtgggcacacagccaaaccatatcacagggattataacaaaataaggtcaagtcatgacaaacagattattttgacgttgttggaagggattgccacaaaacatcattagactaatttacttccagtcaaagaagcctgtatttgcttacatagtcctagaacactgagcaaaattatgaaaggataatctcaaagcctctttttaggtcattagtgtgcgtttagtgagataatggaccctcttctagtccaacattctcttcaggttcttcaggcctgtctcagagctatggaggatgcagcaaaagggatgcctttgatctgctgtctctggatgcacaaggagctcagagaaacaaccaggacacagaacaaaacaaagcatggagctctaatttaggggtttcagctaagcgagtcactcagcaccagcactgcacaggaggtaggtaagtcccgattaagtttctggcttcagaagctcccctctgtgagaccttcagaaatcttcttaattggaaaacagcttcagttcccttcttttcttttctttttcttttcttttttttttgagattgagtctcactctgcccccagaccagagtgcagtgacacaatcttggctcactgtaagctccacctcccaggttcacgccattctcctgcctcagcctcccgagtagctgggactacaggcacccgccaccatgcccggctaattttttgtatttttagtagagacggggtttcaccatgttagccaggatggtctcaagtctcctgatctcgtgatccgcccgcctcggcctcctaaagtgctgggattacaggcgtgagacaccacgccctgcccagttcccttattttctaatgctatgttttcaaggttgttgttagggttagttaaactaatttatatgaaacacctggtgaatatagtgcctggcacagcagtatttatttacatccttcttaagtctttggaatcatagattatactatcagcagataaacttgacagatgcatagacatgatcagaaagagaatggaaggaagatgtggagagggagaacagaagtcagaaaccagaacaaaggaagacaatgtagacactgtaacattagtagagagttatagaatattgggtttaattttaggtagaatgcatttcgttagctctatctggtttatctttgatttgtccattatacaaagctgatctctcttccctctgctgtctactcctccctggaaggtaggcagtgatagatgctaagattggtttgtcctaggctatctcaataaggacattttctctacagaattttctaatttcaatgagccccaaaccataattttgagcagctgtacaaacctttctgtaatgatagtaataaagattgctaccatttattggttgtccataataatctttattctgtttctgttccagttcttacagcttcctttatgagaaagatttgttcttctgtttataggtgagaaatctgagacctaagaaattaagtgattggcctgtgggagatttgaatccggtttttctgactccaaagccttacctgtttcttcctaacatgttgactgcctattctaagcatatacagtgttgcaaatgtctgacactgttctagagcctcatcctcttttcacctccaacatgctcttgtttgtggcctggtcgtcagagtatatgcgctgggctgggaaaccctcattggtggagacaaagtggcaagagagtaaaggtggcaatttccaaggggacctcattgcacatcagacacaaagtgtgactcaggcatgtgcctcaacatataagccaagagagtgccaggcctttaaataagaaacactggatgttttctgcaacttaaatacaagtaagcttggcgggtagggagggaaattgttgtactggaatctaacagtgttttcaaacgttcccatttcaccattaatggtggcacataatcaaattagcctttaagagcaatcatcactccatgggtggcaccgtggtatgcgaagatgcctcggagattttaattctctgtaacagctttctacaataaaacagtaccgaatttgaaagtcattgagagtaattctagtaggtcttgtttatacacgatcttgcagaggtgtctcaagagctagtggcttagattgagtcactttatacagttaaagctgtagatataagcacagacagaaaactgtacctctgtagatctgtagatgtctgtcagtgattcacagctcatacaacgccaagattcaaatttctcttagaagggcttttagtaattcagatggaaaagactttccagacagattccaaaggattatgtttggggactgcaaaggaagaatttccaaaattttgtgggcttacttttttagttttacaacaacatttacctttcctgtgtgatacttgctgatcacaagggcaataccctgtcctcggtaatctattgtgggcttgctgttgatgataataagtttcaccatgaagcctgtgactagcccaagttgtcagaaactcctcatttctccgataagcactttgccaagctggcaaatgcccctaggagccacagtgcccctgttgcctgcacactttggacccttttcattagcttctgactcattgcacttgcacttagcgcacgctctgatgtggacttccagctcagaacccaggttctcgaactcatgaacgcattcagcatcccttgctatcacaaccagcttgacagaaagaccacaggccaagtgcagcagagttccagaaagtgaatgcagcaaaatacccttgctctctttgaggtactgaaaacagtcctgccatttagcttaagtagaaatctaattaatatgttgaagaaaagatcgaatattactgtataactttcaacaagaaaaccaattctgaaatgaaaaaaaagcaaatcatgctatatattaagataaatattttttagaaaaagttcttatatttcacaaggattcactgtgtgtgaaattcaattaagtcttttaaatcagattctatttatgcctttacaattacagttagaattttaaaaatgtttctttctttcttctcttcttttctttctctctttctttccttccttccttctttctctttctttcgttctttttttttttttctcacagtttagctcttgttgcccaggctggagtgaaatggcgtgatctcagctcactgcaacctccacctcccaggttcaagcaattctctgcctcagcctcctgagtagctgggattacaggtgcccactaccatgcctggctaattttttgtatttttagtagagacagggtttcaccctgttggccaggctggtcttgaactccctacctcaggtgatccacctgccttggcctcccaagtgctgggattacaggcatgagccactgcacctggcaagaaacgtttctatcgcacaaaataaagtaaagctgtgcagtacagtattttttccacatggcaatttttgaaacttggagattttcaatgttcacagtttccttcatgcaatgctctatcctagttcaggggacaggatttctctagttaacagatattctgtctttggaaatgactgatctaaatgtcagtctgcatgtctttccaggaaggcatcatcatcgtaaggtgccattatgaataacattctgagatcacctgaaacactaacttaaaaataagacatgctaagttttaaaatcatagcattttctctcatttttaaaatgattaatttatcataaaggaaacactaggttcactgtctcattctgcaaattgtgaggaattacatttgaaggtaagcaggccacttacaacttattcatcctagtcttcaattattacagctatttaagtgataattgctattctaatttcactagaattccaactataataggaaaagaggtaaataacttttcaggggctcatgcttgcatttctttgattatacaagagaaaagaagacaatatgtgagtttctcttcactcacttttggcaacttctgtctgtgcattaagaattctagagctgtagcaccaggaggacaggaccaccctgtattcaaattgggagcctctacaaagtcacctttagactgcagagtcatgcttttctcatcaaaccagccagccctaattttctttaggtgtcatttgtttacatttcaaaatgaataaattcctgtcaacgtgttcaatgtagtacttgaaatgaaatactggatatgtcacacagacagctgagattatcttctgaagtcctaagattctgattaatgagaaaacgatgtaaagccagattcttctcccattcctccaggtttctagcttgaaatttgccttctgaaagtaagccagcttttctcctccaaagtagtgccaggtttctgtctgctaaggggactgatatggtttgactctgtgtccccacctaaatctcatcttgaattgtaatctccatgtgttgagggagggatctggtgggaagtgactggatcatgggggtggttcccccatgctgttctcatgataatgcaggagttttcacaagatctgatggttttataagtgtttggtagttcctccagctttcattctccttcctgctcccctgtgaagaagatgcctgcttcccctttgccttctgccatgattgtaagtttcctgaggcttccccagccatatgaaattgtgagttcattaaacctcttttcttcataaattaccccattcaggcattctttacatgaaaatggactaatacagggactaagcgtcacaagaaggcataaagccttcagtgtattgcagctctgtccaatggtggtcaaattatttgaggagtgggtgggctggggttagtattagagtttacatcatggtcctgtcttttgacttttgtccttccctttctcctgcccttagggtatcagagccaggagggtggctgactctgatgatagaacaagagccaaatatgctcctgatgctccagtagagtggtcttcaggtgatcgagattccgagctcccaaaccaaggcaagaataaggaaactggaacaggagggcatgctgggctccagcctcccgtgacagtgaaacattgccttagaatgactgttgttaatacaattgaggaaatataacacgtaatcttgtgattaagttatacacaatttgatttaaatttagttcctggcagttgctaggtttcactctggcatactctctcagtgtggaagctgctgattcagaaagagatgttccaaagctcatgtatttcctggacacatccaagtactgaataaaatgctggttaaataaatgagttaattttccaagaaagacaccaattacttttagattcttttgctttcttaagcagatgtgtacacattcggaaacataattggagggaggatagaatgggggaaaacatggaactgctgggagctcagtcagagactgaagatgatgcagagacttattgagaggaccacattgggtgcctggaaactggaagaacaagacacttggactcctattttttcacaagttggtaggatggggacagaagcatgggaggtgaaaacattatctaggattaaatactactttcagtttactagtgccacagaaaacactttatttttccacggatgttcagaaacctttatttatttcctcccttagcagtgtggattttgtaggacagaaccatactaatttcatacagatgctgggactgtctctaggcagagttaattagtgttagttaacagcattagtgtacccacatccataaaaaagtaatttccctattgcaaagtcatctaaaattttgtgtcagctcagactctcctatttcccctgaatgtcattcaaaggaaacaccactaacaaaaagctaattaacctccacagaaataatttttaaatccaaagtttgatgtccaaattcccctaggcaaggtcagtagtgaagccacacaatcaatgctgatggctatatcttcataaacaaataaacacatcataagatcataagataactgatttctagatacctacacagtagcagaaatcagaaaggtacctgctcctcacaaaagcatcagaattaaaagcattgtgaacttccttttgatagtttggatgcaaaaattaaatatattataaacgtgaataaacttcaccttatccttaacaagctagatactggaacttagagatattaaaatagtgaattcagaaaacttagggctttcagtcttcaattcccagactatttataaaatgcattccaagcccttttagatgttttatacattattattgacttgaaaatataaatcgaataggttgaaataaaacatgattttcaaatggagaaaaaatagtgagatatatttcctttaaaagatcatgacctctttgcatttctgtctcccttcttatagctcctgcctctggcagagccacatgctcttagaagaacagaggaatagtctaatatagtgccaagaagtcaaagacctttatttctttctaagttacttgagcactgtgcacacaccacacttgagtgtgcagcatttttgtccctcctacttttattttataagaaaatctaatatgtctcttttttctgcttgcttttatgagtagagattatgctttcaagtaatgagaaaggctcatttcttcactttgcaatttccttctaatcttttttatttttatttttccaccttgagaggtctccttgctaccttataccctaatggattcctccgtgctccacagacatggctacagatttatttaagttattgcattccttctgtcttctgtcattcaactgcaaactctgtaaaattcttttctttctagccctaaattggctatataagatggcttttcccaatagttactgagagggcctttagggaaagaatgctctttggctgaccctgaaccaccatatgccaggggacagttaatcctgcttcgaatggggactaagagggaggaagtagagcagaataagaatccctccctctgacaaatacagcaaactgggttatattgtccacctgcatgttgtccacctgtgagagccaggagcaatgcttctgcacttcccttcaatatttctttactactgttcttgtcagcttaaattttatctaagaaaattcttcttttttttttttgagacagaatctcgctctgtcacccaggctggagtgcagtggcgcgatctcggctcattgcaagttccacctcccgggttcacgccattctcctgcctcagcctcccgagtagctgggactacaggcgcccgccaccacgcccggctaattttttgtatttttagtagagacggttttaccgtgttggccaggttggtctcgatctcctgacttcgtgatccggccgccttggcctccaaaagtgctgggattacaggcatgagccaccgtgcctggccagaaagttcttctttagacaactcagtatgttcttggcatatcctacactcagccacaggccttaaaacaaaatccttccaagcatgatgttcttaatataaaacagtagttctgaatcacagacgattttattgtctccacccctagctacattttggcattatctgaagacatttttgattgttacgattgagtaggtgctactggcttccagtgggtagaggccagggtgttgctaaacattctgcaatgcacagggcagccccccacaatgaagaataatctgatccttctgttgaggttgaggaatcctgagatagaggtctgactcccatctcttcaagccagaaaatacataagacctggttgagaggcctgcaaagcttttgataacaccaagttttggattttattccacagacaaaatcaaaaccagcattgttgcatccatgactcactagcacacagtagcattgctagagtaaatagctacctgtttctaaatattctttctcacacatagagacagctgttcgtgagcatagtacgatatacttcatcagagggacttctctgaaaacttgtttgtataagggagaagaataagtgaagttgctcttctcccccagggccgcatgtactttgaaaacagtctctttgaaatggcttccctcttctaaatcttcttgaggttataatgcagagtattttctttgatgtttcttccgtctgtctctctttatgaaagaagctcttcaattgcatgaaaggctctgttatgggattgtttcccaaagactgaagattctggggtcttaactcatttagtagtaaaataggagtgcactttgtaggacccaccttctcctagcactttcctgagtctgcctaagtgtagaaattcccaagctagctagacagcaactttctctgtggggctgtgtgactggcacatacttcatccgaaggaggggtagaatggtgcccatggaaaagggagaaagaaaatgagaaaaatcacaaaaccactgaatattaatgcatcataaaatcaggggaaatggtcaaataaaggaatgggacaatgtgtgtgttttaaaatatcctgtatgtctttttctggatatttccaggatgtgtatggatgtcgattgtagtaaacagaattattatctatacattacagcctcttaatgggatctgcaataataatggaattcttttgaacattttctataattaatctagacagcaatttgctcatatgtatgtggcttttagaacaattaagagaatacaacctgtctgcattatggaagttgttgtgaccttcatataaaaaaaggtttgctcaggagaaagatggaaaaaaaaaaagaactgcaatataaaaatattctataacataaattttttaaaacacaggactttggacattgtgggaggaagaagtaccccattaatatatttatttctctacagtaggaaagtctccagcaatcagagaacaattttagaggtctcaaaaggctcttgtgcttcaacttttaatctggtagtgacaggcaattgaagtagacttgcctttgagtcagaagtccctactcctcttctctttcattttggttcaagttaatttctcctcagctgaaatttgtatgtatgtgtgtgtgtgtgtgtgtttgtgtgtgtgtgttctcctcagctgaaattcatgtgtgtgtgtgtgtgtgtgtgtgtgtgtgtgtgtgtgtatgtattccatgtaatggaaagacaataagagacagaacatttgtattttacttccatgacttgcctttttggcttcactccagataaaactatttttaagcgctggcaatggggtcccagctaccaatcttccgtgctggaggtgacggtgtagaaaggagcaaaaagtgctttccctcatgcaaggtgcttgaaggtgtttatacgggaaaatgattatcgagagtttttaggctggatgacctcctttatggggaagatgttcttcaggaagccaagagacttgagtgctaagagacttgggtgctaattctgggtatgcctacagcttcttggctttgaaaaagacactgatgagtcagttgttttcatctctgatctgggataataaaatctgatgccaatgatcttagtcccttaaaagtggaacctgaggccaaggcttttgtgcgagtcttttgagatgggaattctggggagaaatacaggacaggagagtaaaatagaaaaggagagaaagacgatacaacgatgcattactgagctgtccaccactataaatacctggtgcttgattctgcagggaccttctgagagccttctgaatggtgtctcagaactgtccacccagggcacaaaaagaggaagcatgatgtatccgttttcactcccatcggttaagaatggcaccatgggtgttaatgtcctccgcctctgggttgcatgggcatatgtgcaggggggatgccacctgaaccccatgctgcagatcggaggagcccggggaggaagagagaggcagccagacagaccatgctgaagagttgtctatttcagtctcctaaaaccagatttgagctcgttctgttcaccatacacacattttctgtcctcaacttacgcagttttcctgatgtgtcttcttctttgactgaagaattgcaagtctattcttcacactcaagtcaaatataactttccaccaagctgtttctaatgatagtgaataccgtgtttacttcaaaatgttgctttgaggattaaatgagaaaatgcttttaaagcatttagcgtagtcttaagcatagaggtaacaatcaatcaattattgttgttctttaaattttttttcttaatgattattatatttgctagattactaagcaccatgagggcagaaactgtgccatttgtgagtggctcatatagtgcctggctactagtaggtgtttgttataggtagaattgtgacaagcaaaaaaagacaccttgtaatcagaacctgagaacatgactttattaggagacaaggtatttatagagggaatcaaattaaaacgaggtcactaggatgggccctaatgccatacaacaggagtctttataaaaaggggacattttgacacagagacagacgcgtacagagagaagatgatgtgaagacacagggagaattcatctacaactgcagtccccaacctttttggcatgagaaaccggtttcctggaagataatttttccaaggactggaggtgaggggtggtgggagctggttttgggatgaaacggttccaccttagatcatcaggtattagattctcataaggagtgtgcaacctacatccctcccatgcgcagttcacaatagggtttgcgctcctaagagaatctaatgtccccgctgatctgacaagaggcggagctcaggtggtaatgctcacttacccgctggccactcatctcctgttgtgagcggttcctaacaggccatggaccggtaccggtctatgcccctgtgggactggggatccctgatacacaagccaaggaatacctgaggcttctagaagctaggagggagaccggggacagattctcccttacggccctcaggagcaaccaaccctgctaacatcttgatttcagccttctagccttcaaaactgcaggataataaatttctggttttctaagccacccaggttatggtactttgttatggcagtcttaggaagctaatacagtgttcactgaatttttgagtttttggaataaatagatgagtgacaaagatgtgagtatgatgttgttttttatagtagttcaccctacatatctttcaacgtccagataaattcccacgagtgctattctatagtccttccctgatcttctggatgcggggagatcttctctatcagtaactgcatagttcttctttcaactgatacaaacactgctttgtgacttttctggaatggctagacaactcgcgttttaaatttatggtccaagtatatatgaatacttcatccggaattggaaacagattgtgtcacccatcgtgctcagcttcatcgagttaaatgcctgaaggccctatatgttagtaaatgccccaatctgcttctccagtagtgcccacgtctgggtctgatgctctgcttccttccatatgtgacatttctaacatcagcgtaacaaagtgagagggtgcaggggtgccgatgactccaacaatgacccttgtcagcacttgtgggattgggacaaatgactgctaatattcagatatataaaacatgcacatgtagccaccactgtctccaggcaggaaggtgaccaggcaggctggaaagcagagagactcacatccattttttgaatacccaaacccatatactcccaacaggattttgataaatgtattactcaaataaatctagtttactgtttttgtgcaaacagataaatatcttcctaccacttcttgttccaacttgcttcaacaagaacatctaataaaaatatcttatttcagcatttgttcatggcttgtgcagacattgtttttgaaataatagtctttaaaacgctggtctcaaaatgctttcatgagaaattcatagaggcaaaatattcacttgcctaggtcctcagtagtggttgataaaaattttagcaattagtgtcaccttatttcagtatgaaacagaaaacagtgatgttcttattattaagtcttctaaattagtaagtgggatgagtcaggagggaattaatgacaccaaaggtaaaaataatgtagtgaatatggttgtattaggaaattttaattaaatgtggtttctattataattggttctgatattttattaacatgcttctacatgtaactctatcaaaatatgcatacaatcatgccaacagtttttaaacatttgaggttttaataaatccagtacccatagtgactctgatagttgcagtgtttaaatgaaaaaccatgtcaacattttattttatctgaattatgtagttccaaaactcatactatggctgccctaaaaacagctactcattccgttttctcccagagaactttatacatatatttggtagagcagggattcactactgttaataaataagaaggccccgatgtctaatggagtaagagaaataaaatataagctttgtgggggaaaacaaggtactaattacgtttacttttattttcatttgatgataattgatttttgtttcaagatcagtagagtatgtgatctccatgctcttgcatttaggactagctgaagtcttggtagaagcagagggcatgctggccagtgaaatgttattcttggacttcagtttttccttctataacaaatactagtaatggttggtacctggctcatgggaaaggtgttcatacgcttgatgtcacgctgatgggaaaatgttgatctgattggctgcacaaacccaagccagtgtgggctggatatcactgatgagtaagtgacattcccttgttgagaatcagaagttgacatcacccagtaagcaccttttggctataccagtagtgaaaatattgaaaatactgctgtattgccagctggcaaatagctgctgtcttaagactctgggagctcctcccactcctatcactatgcccgccccctagtccctcctgtaaggtcactgtattcctctagttctaccaaataaaagatgaacactcagcaagcagctctgggacagccagatccattctttttagttgatgccaagtcccccagttgtttgaataccattcctggagttatgataccaatctcatagtttattcgttggaacttgccattttcaaaagatcagtgcattattcaaaaacaaattaattccttttggaagatctggttctttttacaggcacattttttttcacttcattgaatctttcgaaatggaaatgtttaaacactcttggctgttttttattgaaatacgtcttggtccataggtaagaaaatcaactgaatacaatttttgttcattattgaagaaggctgtaactcatatttaagaagtgtttgctgccctttttgagttatactatgaaaaaatgactttagataaaaatagtttttgaaagtgtgttatttgtctacaacagcatcaacactcagggacaaccgtttcctgccctcttgaagctaatttctaactttccaatacactagtgtaaaccatttcttacatactatttcaacagaaccaaaaatcaatagcaaaatgttttaaactacaaagacatagtcttctatgtaatcaaggacaaagttttatctttcatatccttttggagaggaactcaattaactatttgtcatcccccccacccttttttgaacaaaaactaattgcagttctaaaattttcctcattaaaatagagcactgtttaaaaccagtttgtaaatttgcgtatgtgaaacccaaaaaagagatccttaaaaggttcaaatactaaaattgtgcaaagagccatcaacaaattaggcagaagcagtttgcaaagtagatgggcccattttcttcaccacttaatggttatgttgggttaattacgcatatgataaatatcatgtttcagaaaaattttaagttttcattgaactttgttactatgtatttcctatattcttctgtgtcaatgttaatgtcctcaattaaaatttctaatgattggaaaattttttaacctgtattgctccatttagtaatacaggggcaatgaacaaatgctgttaatgatgatgatggtggtgatgttgagggagaggaggctgataaggagtccatgtaacttatagatgggtgcaagaatttaaattcctcaacagaaattctggagaacagatgctttataaacttttatgataatatctttttgtattagttatataaaaacaaagcagtaaggaacagggctctcgtctgctttgtatcagtgtaagtccttcttctgaacattctgcaagcgagaggactgggagaagataaatgcacaggacacagagggctgtattttctctaggcttcaactcattttggcccatggcagtatattctgaaaatagtatttcaaaataagcactgacaaatgttcagtgacagggttggcttcccttcttcacctatgttaggtaatcggcatccacctttggtatttccaagttttctgcttgtctactggagccatgtgggcaattcttcttgacatatgtctacctgtctttctccaaggcagagtcgtgaaatgtttccttctgccttctttatcacactctacaaaggagcacagcctacttcatcaaacataggcagtaactagatcatcccgcttggattcctatatatctctacaagtcagagtcggtgcataacaacctctcgtacaccatagctcatctagaaaacgataaaaatgtgtacagcatagctcatcagatagcatagcttatctagaaaatgataaaaatgtgtacagggcaaagggatgagggggttgacatcaacatctcagcacatttgtaacatattcacaggggcttgcatgtattttgtggaaaaatctgtcataaactaaggcaatttaaactacattcattcaacttaaaataatagcaaaacaacacaccttctcaagtcttgtccatccctttcccgtctgaaaaaagtgtttactcattcactcaatccaacttttatttttaggctatatgtagccagaccatatctctatgctggatttagcatacaaagataaggaactaatattttctgctactcggtggatttatatcctgaatataagctctactggcaaggcattcatcttccttccctactgtacccttcaatttcttattctgcagagaattataatatccttgcagagaattataatatccttatatccattggtttctcggttcatcaacagaaagcacttttgtccccttggcttacaaaccagcaacctacttttctttcactaaccatatgaatacaacttcaacatattattcaacaacttaagcaaattcagactgttaggaaagtagaactttaaattcaagatgcagatttattatgagagtatatcacagttggaacagaggtaaaggaaaccagacatctgttgaagatcagtgtagagaatcaagtgctgtttctttattttgctctttttttttttttttttttttctgagacggagtctcactctgtcactcaggctggagtgcagtggcacgatctcggctcactgcaacctccacctcccaggttcaagctattctcctgcctcaaccttctggatagctgggactacaggcacctgctaccatgactggctaatttttgtatttttagtggagacagggttttaccatattggccaggctggtctcaatctcctgaccttgtgatccacctgcctcggcctcacaaagtgttgggattacaggcgtgagccactgcatcaagtgctgtttctttatctccctctttttctaagttgaggtttctgatctggctggctttatggatgtgagacctgtgcagttgcatggggcttgcacatcggaggacgctgagcttggtttcatgccctgctgttgctgtcttgaacttcttaataatttttgaaacaaggggatccacattttcactttgcactgggcctctgaattaagtagctggtcctgctcctcatatactatcctggggttagttgattctttgcttttactgctaaaaacatccaccaaaactcagccaggcatggtagctcacgcctgtaatcccagcactctgggaggccaaggctggcagatcacgaggtcaggagtttgagaccagcctgaccaacctggcgaaaccccgtctctactgaaaatacaaaaattagccggcatgcacctgtaatcccagctactcaggaggctgaggttgcagtgagcagagattgcgccactgcactccagcctgggcgacagagtgagcctctgtctcaaaaaaaaaaaaaaaaaaaaaaagtccaccaatagttgctttgtcaatagatggccttaaaccattgaagaatcaaggagtttggaatcctggtattgttggacttatagacttgtagtactagagtacagagaagcacctttctctgcttcctctctccagctaccaaggagctcagttgctcagctgaggaggtaagagcagcaaccagcctggacaggcttctgcactcctggtacagtccagggaggctcaccttgctggtggtatttccctgccagccctcacaacttgaacttcccttcttccaaaccagaaaggaaaaaaagggcaacaggaaaggccaggtctcctgactctgctccatggtgagccctttccaactgtgtgctattttgctgttaccatggtgatcagttgctctctactaagtcatttttttacctttctctttcttcagtggaaatttgcattttagaacttctccccaaaacctgttcttcttagcattccttcttcacttctactactgtatgaacagacttcctttttagatttaaaggcgctaaacctccctttagtagttttatacttactttgtattagtcagttttcatactgctataaagaactgcccgagactgggtaatttataaaggaaagatgtttaattgactcaaggttcagcatggctggagaggcctcaggaaacctacaatcatggcggaaggtgaagggaagcaacgcaccttctttacaaggtggcaggaaggagaatgaatgcagaaggaactaccaaacacttttaaaaccaccagatattgtgagaactctctcactgtcatgaatatagcataggggaaattgcctcaatgattcaattacctcccacgaggtccctccctccacacatgggattatgaggattatggggattgcaattcaagatgagattttgagtggggacactgccaaaccatatcaatgatttacctttttattctttactttattacataccctcataagaaactgtagctgaaaccttaacatacttggtcaaatacttggattgaataaggtgaatattgagtttgtatcaacaaaacacttctcgtgtaatcagcatataatttgaatagctataaagttaagatatacaatgaaaagatttgtagaaaatagtctccatgaaggcatattgctcaatttttatttatggagttgaaatttaagtctacacatctctgtagcaccccaattaaaatgagagaagaaaaatggagagataggaactacatgtagtttccagtgtggaacaagtggatggtatttattaacggtgacaaggaggatgatatttttaatattttaactccctgttgataaaagtgaaagagtctaaagtttagaaggggttgttagtgatttagtgatgacctaaacaagcaaatgtggacttttcaatgaaaacctctttgcaggggtggttgaggtcatgttagccagtaatcttttgccagggatcttaggtagatatccattcaacatgtatttttttcaatacattttaattgagtgactactacatctgaattattgttctgggactgtgcttgaactgttcagatacagtttttaccctcataaactctgtctaccgaggatgtcagacaataccagaagaaaataaagggatcaagtatcaagaaagggaagtacaagactggtcctaaattagcctaaggaagaagatctcatccctgactgtacattagagtcatattgggaaacttaaaaacataagtaacaagaatccaattctcaggccccaccctagaccaagtaactcaaaatctctggagattaatataaattctggagatgagcttgaggtgtcagtactgggtgactctcgtgaggattggggttcacctagagggaagtgggtcaaacttcaaccagaaccagaatcacctgaagtacttgctaaaacatacactttagttaccaccctagagatcctggttcaatgggttagggatagggctctagaatttatattaatcattaacaaggtcccagtcgttgcttaggctattagtcaagggactgcaatttcagaactactgctatgtgaaaaccatgaaggctttccaaggatgtgaaaattttcccaggactagaaggatgtgtggacagagagaaaaggtaattggagagggtttggggtatggataacagcattgaaaaggcccaagtcaagaaagcatttgaaaaattgaaaaaggtctaattgtgtttggagcatagagtgttaaggacataggtgaggtggcaagcagggaacgaatatctggtgatactgaaaaccatatcaagaagtttgtacctcattctaaggccaatggcagcacgctgaaggacgttaagtacagggataacacgatctgatcctcattttggaacgttaatgcaggtgactgtcggactagaggctgtttcagcagtcctggtgacagaacgaacagaaagaaaaaaaagaaagaaaaacgaatccacagaacttgacgactaattgagtggcaatgggtcaagtgagggaagagtcaaggatgatacctctaatttaggtttagagagctagaggatggagcccttcaccatgacgcaacacaaagaatttgggtcagtgatatgcaggctgtgggaactgcagcagactatctaatgtccttgaacttcagcttcttcatcaataagaataaaaacgtatctgaatcatagggacactgtgagggttaaatgtggttgtgggtaaaaaacttaatatagaacctagcgtgcagttctcctacctcctgtcttctcaatttagtatacatgttttgtcccagctgaagaaaagcacagatctctaagcacacaactttgtgttatgtattttgtgttatatgctcttaatgtctgtaagatgagagagaaaaccaaggtgatgctatactgccaccatgctagaaccaaagcacaggataaagccgatttgttgttttctcatttttccaatttttgcaaaataaaattaagatttaatataagtggtttctgggaaatatttaaagcaagattctagcgcagttccttgcggcgactcagtgcttcctaagagcagtttattgtttcgtgtgtatgctgggactccttcatgaaagatgtttgatggacaggactaatgtctgcttcatatgctgtctcttatcagaacttttctctgtgtacttaagcttcaaaggaaattatttgacttaggatggaacaaatccatccaacaaccaaccatgttttaatagggttttactctacacatgccctatcaagaatgcaatctgttggccattgctctgtgctccccacaccaataaaaatgtgacaaaaattaatctctagtttttcgggtcagttactggtgggtgaataagttattctgaaacagatatgacctcacagatggaaatccttgacccagagtcccaacttcaatgaagcacttgctggcttgaccacttctaagagatcattggcttctggtccttcctgagttattcctctaacactcttactcttaaccagagggcttttcgaaaaaaagggaattatactaattcaaaatgatttgggaaaatattttaaggtcctcttccttgaaatcttctatttcgaattgtgagataatgcccccaagaaaataagtcttcctatttggtctgagtacatggtgatctcacagataggctacccagctgagcacagggcaagctcagcttaaggatgagtatctgaaaagaaacagaaatgttctgtttttctaattcattgagaattacttttacaaaggtgacatatttgcttttaatccccaaagcgacaaccatttttgtactttatcctcagaaaaatatgtcacatttctttgactctgcatgaaatgcctgtgataagtcagacagaaaaaccatttcttctttgccatgaataaaatattttggaggtcagtgagtgagtgtgtgtgtgtgtgtgtgtgtgtgtgcacgtgtgtgtgtgcatgtgtttggaggcttatgtgtgtaagggagcttatgattttcagtgacattcaagtttatttctattataattaagacaatataatagaacaatagctttgttttgcccttttatggtgtgtgtgtgtgtgtgtgtgtgtgatcccaactaaagttaatgtgtcatttctgacataattatctttaccacccacaaaaagtggactttaggtcaattgaagaggtaagtaataaactatataaggggaggctttatggccatgaatatatagtatgagcccaaaggagtattctctactcaatgtcttctctcccaaacaacttagggaatcaatggctgagcaacattagctaggctccaaaaattccactaatttactatgtgataatatcgttttaaagatgtggtcttataaaaagttacattctcatggaacaacttttgctggaggtatctagctgacaaaatgtagatagtgagattggtgaaggctaattacttatatgactgtgacctgcaaaatacaagtgcaaagaaaaaaaaccctcatgcctggattttcttcttggaacactaaatactatgaaataattaaatctgaactgcaggttgggcacttctttattagctttgtggtcttggtcaagttatctaacttctatgaccttaaatttactcatctgtagaacggggctaattatacctatctcataaatagatactacctcttaattaggtggattcagtgagatagaatatgtaaatactgtagctaattggatgccagctagtatctacttactctgaaattagtaagtgttagttggaatttcctgaaaggtacttatggggactattattttgaaccacgttccccttttcagccatgtccatgagattacaaggaaccactaagatttatatattttggatttaagctaaatttacccatcttggacatagttatccattattttgtaataacattattggaatatttacaaagatggtaaaatagaaaaattcagtgcatgagacagtttaggaaggcatatatattctgaaaagaaagtgggtgctatcacttgaattattaaagccaacaagtaccccagaggttgcttaagatttcatttcacttagctagggtaaacctgcctgaagtagcggagaatttgctaggtatccctgcctgcgacaatagaaacagaagccgttcaatcaaagcaaacaggagaacgagcagctttaggggaattagggcaagaatctcttgtggctcagcatcattttatcacttgatttcaagccagcaaacttgtttctgatgattagatattgttcttaattgcagaagaagcaccttatggatttcctgtccatctttatagtatatttcaatattttgtaactaaatcactattgcttctgccacacctgctttacatttgacacattgaagggtgagtaaaaatgattagagacaatgtttatatgaaagacatgtcaggagagcaagagagaggatctgctattcctggatgatttatttccacccacaacccaaaattataccaacccctcaacctcagattatagatataacacattcccatctggaatagccaagcaatacaaaagaagtattaagaaaagtaaaacccatctaaaatctcactcccaggggtgacataggtgagcattaaaatgctcattttaatgagtattctttaagacatctcttttatgtacacacatgcacacacgtatacacaaacccttttcacagatatatacacaaaattttatataaatggaatcatacctatctgtgcttctttgcaactttatacttctttgcaacatgctccttccttttttcctttctttctcctttcctaaaacctccttccctcccacactgcatttcttcctttcttccatcccaccttaattccttccttccattttttattttccaggaacaaggagttaattatataactttcatggcctactatcatcattagcccatgcaatatccctctttataaatacgtacctatgtgtatgccattgtatttcccactctcattactctcttccccaccccaagctggtgaacattcaatggatttaatgtatatctttaaatgtctatagttgttgtatgcacttttaaacttacataaattttgttgttttacagatatctttctgatttttttttttctcagcactatccctgttcttacatgtgcacctaacctactgtttcttttttttttttttttttttttttgagacggagtctcgctctgtcgcccaggccggactgcggactgcagtggcgcaatctcggctcactgcaagctccgcttcccgggttcacgccattctcctgcctcagcctccccagtagctgggactacaggcgcccgccaccgcgcccggctaattttttgtatttttagtagagacggggtttcaccttgttagccaggatggtctcgatctcctgacctcatgatccacccgcctcggcctcccaaagtgctgggattacaggcgtgagccaccgcgcccggcctaacctactgtttctaaaagctgcctattgtgccctggttccatcctctactcattccttagtgatgggcatttgggtactgccaactcactgtcccgtatacaacactgcaacaccttttttttttttttttctgagacggagtctcgctgtgtcgcccaggctggagtgcagtggcgcgatctcggctcactgcaagctctgcctcccgggttcacgccattctcctgcctcagcctcccgagcagctgggactgcaggcgcccgccaccaagcctggctaattttttgtatttttagtagagacagggtttcaccgtgttagccaggatggtctcgatctcctgaccttgtgatctgccctccttggcctcccaaagtgttgggattacaggccacttttttcggtaatgttccctttctttgggacatatgtcaggaatggaattgctgagtcatggagaaagtttatatttaactaagtgcgccaaacacttcacagattcttgatttttcagaagggcaaggggtggtcagcacccccaagatggagtatcatgaggtctaggattctctttggtccacaggcttactctgattgattctgtgcctgcctgttacaggcagagagacaggggcctggattacccattgaacctgtttgtcttgtagatttgaattacttatttcacataaaacgggcaaagatttccccatggatactactcagatttgaaactagtttttcctaacgatgacatggatgtctttctcagttaatgaatatatctaattcatctcccttttaataacttcagggaatttccttttactttgcttcattttatcaacccttcagtattacacacggaggcttggttttggtttttcactatgtaaacaatgctgcaatgaacatccctactcatgaacatttgtattcacttgatcatttttcatcttggtgtaaaatcgtaggtgtgaaattgttccagcaaaattcatgcacattttaattcttgatgtgcagtgtcatttccctacaaaaagactgtaccattatatagcccccaacacaacacattaaagtatccatttcttcccattcttgaacaatgcttaatttatccatctccaataatctgatattagattttttatttttattctttgattttattaaagttaaatatttaaaatatacagtatttattgaccttcttcctgtaaatttcctgtttttgtcttttgcaaatatttttctattacaatatttgtattattgttatttgtaagacctccatcagggcaaaaatagtaccattgatgtggatctctatttcccattttctagtacttagtagctgctcaataaatgtttgctgaataaacattaatattttgtctgtcatatattttgcaggtttttttgtttgctttaaaattttatttcactgtgcatatacatattttgatgtaatcgacaggttagtcttttcccttatgtttcagttttcctgtatttttagttttatttactccacatattataagcatatttggtaactattttattatagtccttatatggttttattttttagcattaaaatttttcaatccatatcaaatgaactcagtgagatcagtaacatagggttctggcttatatttttccagccccttttattgactggtttgttgttttacacataatgctgcatttatcttatactatattttatgtatacttaggtccattaaaaaattctctattcatttccacacatttattacttaggctatctttcttataattttaactttattgactttgaaaacataaaacaatcacatgactcaaaattctaaagagtccaaaggatacacagaaaaacgtttcttttactattaccatatcaatcagccctatgaacaaactgagccccgactgttgtttttttgctctttgttttttttagacggagtctcgctctgtcgcccaggctggagtgctcagtggcgtgaccttggctcactgcaagctgtgcctcccgggttcacgccattctcctgcctcagcctcctgagtagctgggactacaggactgttgttttttaaaaatagtatattatagggattgttacgtatcttaccttttgtgaagcttaacagtaaatcacactatgtcaatataaaagaagctttttcagttgttccatatttgaatagtctcacgttgatggatgtttaagttttcctaaacttttgctgttaaaaaatactagaatcaataaccttgtacaagcttattttgtaccttgagtacatgtgaagaatatttcctagaagtgtgattactgggtcaaagggtaaatgcgtttggttttctgacagataataatattgacaaatcactctttataaaggttgtgctaattttcatttctaccaacaagggatcagaatgacaaccctccatcccccatatacatacagtgggtgttgtttggggtagtatttaatctttgtctaggtttttttttaaaaaaatatcacattatataacaacttctttttcttctttggttaaatttggagatttataagctctgagacacttctatttaaagtatgtatgacatacacagaaaatctctttgtttttaataaaagatgtgtttacagaaataaaaataaaattaactatagacttaccattgtttaattaatactatcccatacatcaaatggattatttctaataatgccttaaatgtttgaaaattcgtgagtttcaactctgagttcacacaagttaagatacattttagtttagtaaattaaggtgtaatagaaatgaatgaatgaattaataaataaatacacttataaatcagggagttgcccaagctgtctgatgttatctcaaggggtattttgcagctgaaaagctccatgtaggcaaacagaaacatcaagtcataaaataaatcctactcaggaaaaatcataatttgacttaggttttaataattattattgaagttgcagcaaaacaaaacaaacccagggtgattagtcaattcataaacaattcagaaatggttccctccaatacctagtttttctggtgcattttaaaatgtgtgattatatttttaaaaagctttcctcacaaaaaatcagaagtatcaccattttataaaaatcgttttataaatactcactgctacaagaagatatcagcctaatgccatgcttaagttgaactttgaggatttattttgacttttaaaaacgctacttcaggctgagtgtggtggctcatgccgtaatcccagaattttgggaggctgaggcgggtggttcacctgaggtcaggatttttgagctagcctggccaaagtggtgaaaccccatctctacaaaaaatacaaaaaattacctgatcatggtggtgtgagcctgtaatcccagctactcgggaggttgaggcaggagaatcccttgaacctgggaggcagaggttgcagtgggccaagattgcatcactgcactccagcctgggcgacagagtgagactgtctcaaaaaaaaaaaaaaaaaaaaaaagcccccgaaaaacccattacttcatttttgttcatatactttttggtatcatacacatggcaaagcgcagaaagtgcgtgttccttatgtgacagctttttgttccctgggcatagattcccgtggctgctgtagcgaatgaacagaaacttggtggcttaatataacagaaacgtattctctcacagttctgaaggccagaagtccaaaattaaagcatccattcccaaggctttatccctctgagagattggagagatgctgccacagtgaaagaatgggctaggggacaagcctatattgcctctgtcagtttctggtagctccaggcattgctggactgtggcagcattaccccaatctctgcctttgtcttctccttccctctgtgtctctcctctgtgtgttttggtgttgttgttttgagacggagtctcgctctgtcaccaggctggagtgcagtggcgatctccgctcactgcaacctctgactctctgggttcaagcgattctcttgtctcagcctccggagtagctgggattacaggcacacaccaccatgcccagctactttttgtatttttagtagagatggggtttccccatgttggccaggatggtctcgatctcttgaccctgtgatccgcccgcctcagcctcccaaagtgttgggaatacccgcgtgagccacagcgcccagcctcagtgtatcttacatggacactagtcattggatttacagcttatttggaaaatgcaagattaatgtcatctcaagatttttagcttaattatatctgcagaagccctttttccaaataaggtcacattctcagtttctgggggattaggatatggacctatctttttgagggccaccttcgaccctctacacccctattctaaattctattactgtagttatattttgcctatccctgaacttcatgtaaatgaaatcatccctatatccttcttggtgtctgtccagcttctttcaccagtttgctttttgttaaagaaatgtacacagaaaagtctctctggtattgccacagttaataaatttcctgtgaaaccagaaagtcttgggcaagacattgatgactgtagcacatggaggataaaatcaggaagcttcctcaaagcactcgccagcccagccttcccatttagggcaccctacaacaaaatcctgcatttgatccattttaacttgagatttctcagttctaagagactcagtatataggaattaaacctatccccagtaagccttcagataagagtgtctctgaaagaattcattgatggatagccttgctttgaataagaatatcttcacactcacactaagggtcactaaaccctttcatagctctagagtcaggctttttcatttatctgagattcattgtaatgcatttgtttcttcctctttaatgaatggatattgcttctctcaaatttaaatttagtttcaaatacatatttacgatgtcattgtctgtgctcaagcaggcgattttaagatgatctgtaagtataaccaggcaaattcgctgttcaaatgaatcctgccaacatatttctcattaatcctgggaacatgacaggtgcatttattaatacagaggacttagtgttagaatgccatgtcctttctgacatactaagccatttttaatttgctcttatcatttaaagtctctccttttcaaagatattagataactctacagtgttaaacatcatggagtgatttgggggctcaagggagagcatcttatataaatgttttcctaattttcaaaggatccaggcaccacccaaaatggtaagattcatagactatctggaggagagggagaggggaagataattttgtttatttaattgattctctgtaacttttctcttggcaagtatagctcactaatggactttgcacagcacaatcattattagaaatgccactgtgacatttgattaatccagtctatttagatttcgaagacaaatcatatatttatcctaatataattaattactatttcctccttttggattttccaacgaacagtatttagagatatccttgacattttcatctttagcctatagacgcaccacgattcttcataggttaggtccattccagtgtgatgcaacagacattttttggtagaacgccaggaacatttatcaatcttgctagtgacttcatttaaattttaataagttatgcatttctttggtaatttctagtgctggaaattgacaacagggttttatggcttcctattttagtgtccctcattttgttcctcgtttatcctgatctcccaagagaaataacttcttaggcacggtcgaagaatctttgtacgaagtttctcaatttgagacaatataattacttctattcattcatttgttcatttatgtaatcatttgtttgcttcttcgataatctaacaaacagttataggtgataaagataaaagtatagcagtaaatcaaagagacagtctatatctttctagagctcacatttcaatgaacggtgaaagatgacaaaacaattccaaatctatacaacatgtcagattgtgataagtcccacagagtgaaatgaagcaggatgaggagcttggaagggcgaattgttatgagagtgattgtgttattatacaaggtggtcaagacgggcattgcgaaaagacatttgcagatacccaacgccatgtggtatctgggagaaagcattcaggcagaggatgagcaagcccagaagtctttgagcaggaacatagaatcctagaatggaacctaaggaggccagtgagcacagttgagatgggatggaaatgactcagagagtgggtggaagtcagatcacatggtgtcttatagaccaatggtccccagcccttttggcaccagggactagttttgtggaagataatttttgcatggaccaaggagagtggggaatggtttcaggatgattcaagtgcattacatttattgtgcactttatttctattattattacgttgtaatatatcatgaaataattacgcagcttaccataatgcagaaatcagtgaaagccttgagcttgttttcctgcaactagacagtctcatctgagggtgatgggagacagtgacagatcatcaggcagtagattcttacaggagcctgtagcctagatccctcacatgcacaattcataatagggttcacactcttatgagaatctaatcccgctgctgatctaacaggaggcagagctcaggtggtaatgtgagaatggggagtggctgtaatacagatgaagtttcactcactcactcacggctcccctgctggtgtgtggcccagttcctaacaggccacatggcccattggttggggacctctgttacagaccactgaaaataatgggtttacttcaaatgaactggaaagccattggaagtggctatgttaaaccttacctgagacctgtgctccttaatatcagcaatgatgaaagaaatccctgtactctttgtcttattagaaatggcttactgcaagaaccacccttccccatatgacttagataagggttgggaatgacttccttgtttacctagggcaaggccagatgcagaccttccaaattcccattctttgtctcatacacgattagctgaactattggtccccactgaccaatcagaacaaaatgcttgttaatttgacttaaccaaacttcaattaagtttcactcttcaccacaggaccctgaaattgactcacttcttaggttaagcaagtattggagtcataataatccctcctgaaaatcatctacaaagaaagatgtctcctgtttaactgtccgatcaagccatctgctctccccactcccccatacctggctccttccaggttggcttactcctttctgtaaaagaaaagctcttttctgcctgacctttgaattgctttcatacctcacggagtaagcattttccctattgcaatagtaccccttcccttatcgcagtaaccctgttattgcaaaagtcctttcaaataaagtctctattttcttaagtccagatttgttttttatttgctacaggttttgaatgtaggagagatatggataatggagtttatgaataaaggctttgggttgattgctgcatggagaaaagcagtagaaacctgtagagaaacaagaaaggtaatggggaaaccagtgtttatttccgtgttgtgaactttaaaagggtatttgtaaaatgcctataaagttttagtaagaattgatcatgcccataagctgtattcaatgctcacaaatcaaatctttgtgaagctcatgaataaatgaaggttgctagagggaaagttaaactgagtgacatgttcacgtaagtctcctttaatatttatttatttatctatttatttatttatttgtggtggagtctcgctgtatcaccagactggagggcagtggcatgatctcggctcacttcgaactccacctcccaggttcaagcgattctcctgcctcagccttcaaaatagctgggactacaggcatgcgccaccactcccagcaatttttgtatttttggtagagacggggtttcaccatgttggccaggatggtctcaatatcttcacctcatgatctgcccacctcggcctcccaaagtgctgggattacaagtgtgagccacctcgcctggccaagtccccttttattatatttgagatacatattaccagtaagaaggcccaataaatgatacaggttaagatgttaatcataatgaatgcccagtttcgtagtttctttctttctttcttttttttttttgagacagggtcttgctgtcacccagtctgaaatgcagcagtgcaatcacagctcactgcagcctcgaacttccaggctcaggtgactctcccacctcagcctccaaagtgagtggggctacaggcgtgcaccaccatgcctgtatttttgtattttttgtagagatgaggtctcactatgtcagtcaggcttgtcctgaactcctgggctcaagtgatccacccaccttggcctcccagagtgctgggattacagggatgaggcaccatgccctgcctagtagattcaccttattcacctatttacaatgaatgtttggttggtgccccttttctaaatcctattccagattctaggataccacagtgaatgaaggctcattgcttcacggaatttacattccaggtggggtgatggattctaaataacaaatcagtttaaaagaggcactgatggtggtgggaaaaaagtaaacagggtaatagaaagatgcttgggaaggagagggggccaactttaaattgggtggtctgagtaggtgacactgatgctgagaagtggttggaacagttagtgcaaaagtcctcagagaccaagagttgggcatcatccaggaacagaaagcagatcactgtggctggatctgaagctggatctggagtatggtgtgagctctggtcaaagagaaatgctggaccagagcccatgggacttcgcaagatgtggtaagggacgagaaatttatcctcagtgtgatggaaagccagacaaatctgtgatatactgatgctggagatatctcccgattagaattgtcttttcctgcattcccaggagaagaggaggaaaaaaaaaggagggaaaagggtttgggggcactgaagcctggagaaagaacagtgctttataagagtggagtcgttcctgtggtttagtactatgattgctgttgagttccagcaaggaccctttggattcagctatccacatacatgaagcagggagagacaaagaagaagaaggagaagggaagtggggggggaatttaaatagtatagtttaggtagttcaatgggcctgaaatagtccacgcatgatgttgaactgtatgaaaagcaagcctcaagacttttactggattctcagccttggcaaagaaggaaaatttattcttaaggtgggcaggcaattggtcaatgatggctttctaatagtctagtaaaagcagttgaaagccctagagaaatgctgactactaaggagttggagggcctgataaaggagaggatggagattactgtagagaggaagaaccaagatgaaatttgcatatatttgttgaaatattttaagcagaaaactcttaaataaactaatttctgaatatgagctttctgtgggcctatgtattcatgatactataaatataacaaatatttacacatgtattgatggagaggactgcaggtgcaaataagaatgtttgctttatatgctgatttaacaacataatttttgtacgttagaatttttgataaaaaagtgggttttagagtttaatgaaatacttaccatatcaattttggagtttaacccatttgtaaattggaaactgactgttatgtgtgtgtgtatatagtatatattaataaatagtatatatgtctatgtattgtgtatatgtgtatatgtatgtgtatatgtatatgtgtggatatatatacacacatatgtatatagcttagataagttcagcttttgaatttactggaataagaggtgctttccctttgttccatctgtaaaagaagaaaaggatccccatggttgccatgattatatgacacagatggaattatgaattcagtgttaggaaagtgctcatgattaccattatttgaaatgtcttgtgggtgaggtgagaaaattacttcctgaaggtgcatttactctctcagggcactggtttgccattcccatcgttatgaggtaatttcctgaaaggcacagacttctcaacatgagaaatcctagagcattgtcaaaagcaagtttcatcccaagtacgcagtaggcactccataaatgtatgctgaatggacaaaatttgagcagctggtggtgataattatgatttaactacaaccaaaatgtccactatggttaattaaatatgcctgctctgaaatatttcctttgctttgctcagtgcaacatgatgcatggagttccgaaggcatggtgtggactcactgctaggtgatggtgcaagttgcaaggtacacctattcctattcatgatgcgacttagtatgaaagtgacagtacaaacgtaaacaacctcattagcagctcttaccaaatgtaaatgtatagcacgaagagtaattgttttactggggaaagaaagaatatctgcttttttatttttaattagcttcctcagaatacgggaagaataatttccacttttgtctcagtagcacttagtgcaatcaaaactatttaatgtcactattttctactaccctgtgtcaattaatgcaccttcattgcacgtgagcaaatctgatcctctccctcatacgcaggctgtgaatgaaagctggttcatgtaaatggcccagaaaaaaacatattcaggaggaggatggaggaaaattcttctctaatatgcacacacactacattgttgactgggacctagcatgcaaggcaatatagggtgtctacgagactaagccagataacatgaacatgaggctattgcttgtggatattcttgataggaacatttttttgtgtgtgtaatgtttagggccatagccttggacaaccccgtgcattaatctctcacagtatagtccacaggaatgttgctcccccaagtcccatagtgcctagctgcttccatatgtaacagccctgctacaagttatggctcttgagtatattcagtggagtgcatgctctctctctctctttgtctctctctcccaccccctaccctgccccttccccttttccttttcccctctctgccttttccttctcctcctccttctcccccttcctgtttattcctctctctgttggttaaagagcatggcagagaaagacagaaaggaaagctgccttcccctactagaagagaaatatcctaataatgtgaccatcaccggctagctaaataattcaggttaactagaaagggctactagaagaccagcaaattagctgaattatagaataagtttgaaaatcattgatttcaaataaatacattaaataaaggctcagaaaattttgcttatagcggtgctccacagatttgctttaaaaatgtatttataattcacatgtaattgtttgtctgccaagtgggtgtgtttttaggaagcattccacgcactttgttaaccttcttcacaaactttgccctcgtggaagacacaaaggtccatttcagcatggctctgtccaaattatgacaattattttttataataatgacataaagcttgaaatgcaaatttatgtacaaaatgttttaaaaagacctcatgagaataaaaggactgtgttttcatagtccaacaacaaaaacctgattttacttcaaaaagtgaccccgattagtcatttaattttaccaaaaataggattttgtttgataagataattataacttgtttttcccctaatattccagacatttcataatgatcaaatgaaatgaccacatatgaaagcaatttctttaaaaacagcctgtaattccctaacaatttagtgcatagaaatcatcaattattaaattaatggagaaaaacgtatatttttaaatatcgattttaaataactgactcagtagcacatctcactaaaatccagatctgtacatgtcactgtgttagagaaacattatctcacttttaaaagcccagcaaatattttcacaaccttaaaatactacttgaggaagttactttgggtttacagtcagctattatagttctataattgtcaagctatgaaacatcatcatcatggttaaaagtaaatggaagcaaaatgtacctcgttccttgtggatctgtgagttaaccagtacatgggacctgctttctgaatagtacctaggcagttgcatatattatgtgttagaaactgttttctttttatgtactgatttttccaggtacagaataatgtagttgggtttcttgggcttttgtgttattgtacagtttgtttttcatggtaaagagaaagttggggaaatagaaatatgtctctgagtaactaactcattattggtaataattccaactgggattttgtccagagacaactagtgaaagaggcttcctcttcattcactccatttactctcctggaagtatgatcatataatttatcatcccaaatgacagcatttttgagtgctggtaaaacagatgtaaatcagagatgtcctgggcaaacagaatgtaaggtcaccctggctgtcactcaggaagctcccaagcttcctgatgctttgctctaaatttttttttttttttttttttttttgagatggagtctccctctgtcacccaggctggagtgcagtggtgcaatcttggctcactgcaacctctgcctcccaggttcaagtgattgtcctgcctcagcctcctcagtagctgggattacaggcacctgccaccacgcccggctaatttttgtatttttagtagagatggggtttcaccatgttggccaggctggtcttgaattcttgacctcaggtgttccgcctgccttggcctctgaaaatgctaggattacaggcatgagccaccgtgcccagtctgctctattttaagattggttaattatctatgatttctatttttccctgatcttttacaccagttcacaccatgtaaaatgacttccctttgagctatccttgctgctcaggttcctgatctcccagcagctggtcttcaagcctctctgggtaacctgtgatatcttcatcaagtattctcattttctccacacattagaccaatattattactcctttcttatcctattgccccatattgctccacctgaattaatgtaaactttttttataatagtttctcagatgctaataatttcaacagtcttcaagaccacaactaaagaatttcccgaatactctttatccatgctacttgacacttcctacacagaaataacttttgatgactctgtgaacagataaaggctcattacttttaacattttctaataatttaatgtatttcctcttttttacttgctagcaagagagttgcatatcatgaatcttttcttttgatagtgaggctatcaactttttctttttttctgcttgtaagtctgtctaacttgtctcatatttggacaatgagcttctaatgctgtccagggttgtcaaaatcatacttcttcaattcatttgcctactccatgactactggaaatggccacatttgtacattatcacccttaagatggacacaatttgtttatgtttctaattcttagctttgtctcttgaaataaaggataggactcagttattacatattcaaaattttgtgtgcattttgtcattgcaggcctatttattaagaaagtttatgaaaatgtgtccacacatctacaagtttcagaaatttgaattatatctcattcttagtgggctaaataatgtggaagaaattaatgctgacagcagtcatcatctcttagtcttcattctatccccaaggctgagtgtggttcttgggtctttgaagtccctagttaatgtccatttaatgaatggagaccaaagtaaaatttggagaaagacctaaactgccccaatcaatttaatgataactgatacaggtcaagtttattgttatattttaattgttaattttcaccattgagattatataattttaattacagaaattatatctgtataatatattatacattatatattctattgcgtatcatataaaatattatgtaagctattttgtaactttaggcactcagcaattgatctgatctctattataagaagtgcagcgtatctgtttttttcttggtttccattattatacatagttaacaaagctacatctaaaccaacattaaaacagaatttgggatgggtgaggtagctcacacctgtaatcccagcactttgggaggccgaggtgagcagatcacttgaggccaaaagttcgagaccagcctggccaacatggtgaaaccccatctctactaaaaatacaaaaactagttgggtgtggtggtgcatgtctgttatcccagctactcgagaagctgaagtaggagaatcacttgaactggggaggaagaggtttcagtgagctgagatcacaccactgccctccagcctgggtgacagagggagactctgtctcaaaagcaaacaaacaaacaaacaacagaaaaaaaaaaaagaaaaacccacagaatttagttggtttctaatgcgttagtacaaaagtaaacattttaaatagccatagcagaaggtgaaactttcctattatcaggaaatcaggtagcggctatcaagctgccagcaagacagtgtccttacctgcaaaaaaaagaggaatgaagctcagagatacactgaccttttgtactatgtggggaaaggctgcaatcattttcttaagcctgtgtgaaaaatgtttctggtatactttatgtctttgtgcatgggaggaaggtctgaggaagccacgcagaaagcatcagtggccagagaataattgctgccaatcaggcctttctcacccacggttctgagatggaggagttgtcatgtgtacaaatgaattcctgatgtgacaggctgccatgaacagtgatatttggcttctgtttctagttgattatactacaaatctattcctggagtggagagatgtagagacattgaagccaatgtatacggggaagctgtgtattatatatgcaccctctcagttttcacccattcacaaattcctgcctggacaaaataattccatcacacagcctcgtaatttatttatagttaatctatgacatatatgtaattagttgcatttgtcaatataataaaaatgttgaatttgcaaggatagtaggcaaaattcttcactaatttttgatcaccttgaaaagaacagttccatttaaaagttgtagagttctacatgaagagcaacacaatgcctgagcttgtcatttttctttaacaatgtcccgcctagatttcttttatcaaaaaagtacaacgttttctcccactagatgaggtttcctcctgcaatgcccaatcatccctttattattgcctcctctgagtagatactgcatcctacactcttcatgaaattcagctctttcttcagtgatgaaaaacaaataaagtctgtttttcagtttgttggtttttagtcccaatgagtatgttttcttcttttgttttgtactcatatgtaagtccccagagtacttctaaaacaaattatagagaataggtggcatctactcaacatgatgagtcctgaataccgactggaagaaattgactttatttattaaagatcctttctatctactgtcttttataatatacttggctgtctgtcttgcattgatccaacctgataataagctttattaggtctatcctctgaacatccaaggatactgctgctaaaaattcttaggcgaatgggaagtaatgacttaccagattctcaatttaggttttattggtgacctcactgaaaaagctaacaataggatggataaaatttaactctactacgtactccaggattatcgttcattactttaatgtaagtagtgctaagtagtttagcataactttaaacacacaagttctttttcttacaactatatagcttagagccctaagatgatttagttgttcaaatttttccctaaaattctgcaatttgaataaatatgagaactccaagtgaattccagtcttaacattgtatcacattaaattgaagaaagaaaagcaagacaactaccacagtgccttttaaaaatccttcattcattacctgcatttctcaaagaattttagagtgatttcaaagaacattaaaagaaacacttttcaaagtccactttcctctcaattcctgtctccaaatactcctcggcatgtccaaagcctctttgggttgctcaaagcagtattaacgtgctgacaaattctagggactctgtatattaattctccttaaacattggtgggttaaaaatgacactatatagtccgaagacatcacctggctggcttgctttacttggtggttggtttggttagatgctgtgtttggtggaggtaggagtgaagattggagagaggctgagagagatcgatgctaaattaattccatttgtccctactgacaatcaacaaaagattacctccagataatactatctcagagaacacctgagaactgtaaacattgcctggaattgtcacattccaagaatgccagcaatcccaggctaaacctcatcatccaaaataaaggttatcaacccttttcctcatatcagttacatggaaacaatcacatcttccgtcttggacatttcaacctttaatgtgccatcaaagcattatatttaaaaatctgtcttgcttaattttataattagaagaactggaaaagaattgcaaccgttttaagacatttagactgacatggacacttaccatatgtaaaaccacatggcgctgttatgctattcacggaatgtctcacttaaggtagagagtagaatatcttccacttaacatgtaaacaaatgtttaaagacattaggtgacctgtccagggacacacagccagtaaaggccaacctcagatttaaacccagctgtatctcactccagagccccagagcccaggtgtttttgtttgtttgtttgttttcatttgttttttgtttgtttgtttgttttttgagatggagtctcactctgtcgcccaggctggagtgcagtggcacaatcttgcctcagtgcaacctctgcctcctgggttccagcgattctcttgcgttaacctcccaggtagctgggactacaggcatgcaccaccatgcccgactaatttttgtatttttagtagagacaggatttcactatgtcggctaggctggtcttgaactcctgaccccaagtgatccacctgccttagcctccctcccaaagtgctgggattataggcatgacccacagtgcccagccagtttttttaaacagacaacatttatattcaagtagaaattccacttatggtattactaaagaggtcattttaaggttaaaccattattggctctacagtaaagtgtgaatgaattttgttaagtggaaaataataaaatttatttaatcataagaggcttctccgaacttcttctgcaaatgagattgttgtactgaggagtctcctagggtcataacagcttgcaaagtacatcgttctcttatgccatggcatgagaatttagacagttcctttttctgtgggtacatgacagcaaatcccttataagttatctggatcacaaaaatgaaatacacgatctggctttcttaaagcctacatagcccaaagcactggccctttagctgctccctctaggcatgcaacaattcaatgctaccaggcatttcctttcttatgtgtcagggcttatctctgagaacagtagaaagtgattttacaaatcgaaaggaaaacaacttttctccaccatgtgtatgcattcttacaaacccatactggcccattttccccactctaaaagcttttaaaaagaagacacctttattaagcaagcattacaagtcagcattattgtattcacacatatatgacagaatggactatagcgagagtatgtacccaggtcttgcaactttaaaaagggaatgtgttcttaacatttcctaatggtcaattgtttctttattgtacttgatgaattcttgttggaatttctgttggctcaataaaccaaaaactcttcaaatgaaaataaagttaatgaaacaaaccaacccgttcacgcattaggcttttgatgaataccttctgtgcacctaacactatagtagattgtgtagaaaacacaagaaagtataagacatggtctataccacaaagatactttgtatattggaagatgaacactgtcacacaagtatgaacaaaaaatggtaagaccctgtatgtagacaagtcggaggagggagaaagaggatccatggtctatacctgagtgcctgaggacagggtgaggcagctgatgggagagggcaaagggcggtaattgctttgattttgcctcatcacaactccaaagccagcaactggtttacaaaacaagggccatgatctcactgaaaataatattacaagagatccgatggtggatcatttaacttttaatgctctcattttacaagtgaagaaatcaagacagactggtgttgagtaccttgttgaagaccacatggttgactagggacagaaatgagcttagagccaggagtagtgactctttggaatgcttttaagttgaccatttcttctacactggcctcccatacacgcaggctattttttgacttactcttctattaggtgggtacaaaagtaattgcggtttttaccattacttttaatggtaaaaaccgcaattacttttgcaccaacttaataaatagtacttacctctttttaaatttagctgacacggtccaaaaagtggaaaagtcacagttaattatttttagtcaggctattgatcaggggcttaaatcaaatacccaaactgaattcagacttcactaatttgctgaagcttgaaatgtggaaaaaagccccaaacttcaaggtttgtgaaacctggatcatcattttgactgactaccagtgtgtactaactggaactattttcagtaaaattattttacggaaattagtaaaaaaagattcagcatgttttacaagaagacagcatgaagatatagggctgtgaagttctgcaactctgtggacatattttcaattaattttcacatacgcagatattgaaaactatatgtatataagaacataaactctttataaaacaattctcaattcaaaaattattggttaaagaaatactgttcttctacaattatagcccagtgataattataacctaggattctactggactttatttcataaggcaattctttgacgactctacccactctcttttttttcttttctttttttcttttgtagagataagcatccattatgtctcactttatcagactttgtgaaacaaagcaaacagcaaaaaagaagctgggagatggaaattcagaggtgcaagaaatttctcattcatatcttggcatttatttctccctgaggcaaaaatggatggaaccatttcagaagctgagttttccagttatgctgaaactgagaggaaaaagctcccctcaactgccagacacatggaaggcactagaaggtgccccaacatgactagaaagatctgaattctcaattgtctctgaattcaaaaattgtggagtcagagctctcagtttttcttacatctaaatgtcaagccctgctattaatctttttagaaaatatatttatgaccttccttactctttatgtctctgactaccttaacttaaggctttattacaaaatgccttcggtaagcctcaggtttgttacttttgactcttgacaatcaaattgactttcaccctctccctctttcagtctctctctctttctctgtctctctctctgcctcttcccacctccaacacacagtagaataacttattttcaaaaaaaatattgctcttgttactttcctgcccagcaaactgttgcaccaaatgaaaatctttttgtctggatctcatcatcctccattctgtcctccaaattgattcactgtgcatcacgctctctgcatcccatacagcttctaagatgatctctgtagtttggttcaggctattcacactgactgaaatgcaatttcaagcctccatgtctataccaatcataaaaacagaaacccgaaagaatctctccttgactatccatcatctgcgatccattttgaaccctctgtctgccaagaaatgtgtcttgaccaatctagctcacataaagtatatactgacttgtttccaaaattacaacttagaatttgatcccggatcttccactagtatgctatatgactcacaatacgttgcatgttccttgagggaggcactatataacgctggatgcatggctgaaatgtgctgacagtcatagtgtccagcacagtcctatagatatgaaggtttcttattaattgattattatcaaagacctcaagcagacagtgaaattttattacataatgctgtagttttttttcacactctaatgcttgatgagatgtggatatttacgatctgaatttgatgagtggataactatcccttaatagacaatctggtggtcagatgtaaagtaaccataactccatcctcccggctgttccatgttcttctatgtgagatttgttcctaaattccaactttatttatttttaaaaataattttgtaaaatgcaaaaaaagcattttaataagtaagcaaatgccatagttatggttgctgcagggttaatttattcatctttcacaagctaaatgttaacgcatacatctaagtgccaaagtaatcagcaattatatgcaccacataagcaaatgaacatgtcaccattacattctttacatttcctgcctcttatcctggaacaggattcagaaaagtgtcaatagaatgcaggagaatgccatgtgttgtgttgagagaattttctgggctggggctctgaacttcaaagacaattttgggtataagctggtgagagaaaccctggtggctcttctttatagcagggctttcactaagtaaatggccccatgtgcactctgaagagttgtggaggatgggctagctaacttcctaactctgtgaatacatggttcagctctgtgcaaatccacaattggcttactgactcacaaaattggtaagtgaggaaaaaaaatatgtttttttttcccagctaagatggctattattttcctaagctcagcatccttcctccattgctttatccaagcaatagaccccattcctacctgtaagtctgtacacatgatcgaggatgatcccattgactcatttcttggaattatttctagttggggtctgtaaggaagagatccttttctcttctatcatggaatgtaaggagaaggaaaagagctgactgtagctatgtgtccagcatcaagtagataaacctggtctgggagaataaacctgatacactaaggcaaagggttggaggatggacagaagctcataatggcattagatgtcttgaccccatcgtttcagttattccaaaaccagctcagctttttctttgaatgtgagatctacctctttatcttgataataactcccccatatatccatttttcccctaacctacatctcgctcatacgtaatcaaagaaaagtgtctaaaacatcaaccaaggcaagggagaaattttttaagccaaattttcatcagagaaaaagagattctaaagatttgccactctccttccccatcagcatgtctagtttccatacctggcttgaaaatgcttgcaccaaagtgcttcctaagaaagatttgtgtgcttgaaagagatttctttaatttgacaatagagcatggtccattttcaactccaattaaaaaaaaaaatgaagacaaaacgctaaacttgcctcactaagtgcaatcttatttgaatacaatgaatatagaagaagctgaatctaattataaagtcagcaaatggtaatatcaggatgttgaggctaatgttttttgcactgtatgatagtagggcaaattattttcagtttaattgtaaagctttctttaaagagagaaatgacacattctatgttatcatttgctacttttaaaaagttataaaaatatgaacggctaatgtttggggaactttcccctgctattattcttgcatgcaaatgccagtttgtgtgtgtaaaaagaaaggtatctgtgggaagttagttatacataagtgtcattaaaaatactaatagcaaacttgtatagtatttaccatagaccaggcactatcctaaactttcatatgacttcattttgccctcataatagtcttatcaactattattatccccattttacatattagaaggctgaagttctgagactaacttcacctcttaaaggcaagctgatgtgatggagtggacaactttgtttgcctaaccagcctctatttgtttttccttttcctttctcatgagtttctagattttgtggggatatgcagcttatgaacttcatgggaagctaagcccactctgagtatgaatgggcacaaaccacccctccaccccctgcagccacagttattagacctaagagagccaaaaagggcaaatctcagcctagttgttagaatgctagagcaggctttgctcactcattcacaaatcatgtgatatgtggttataaagcctggaactgctgcagccactttatcactatgggtaacaggttcagcaggaagctgatagtgcagaaggcagggaagagtaaccgaagccactaggtcctttatgacatcattgggccactgatcaaactggccctgaaatctgattcaccatgaacttccagtgttattagccaataaatctcctttaggggttaagctaattttcaaatcaaatgcagtgtaatttacctgccttttaaattttgaagactaagaagaaattgttttcttctagtggataaacaactccactagagtgagtggggtgagaattaggtactttataaagctaaattaattccagtcaataaagcaatcaccaacacacatatttgcttattgtgtgttggttagtgtatataggagagtactaatgcacagggtgccaattctccccacctgacacctatagcagacattgctagtcagccattatggtgctcctactgagccagctttccttctcatcagtgtttgaggtaaccacagtcaagagaccagagttggcaagggaaacctgtgatcactgatataggtagtcactgattgttgctaaaatatatacctggaaatttggtgaaatctctgcatcataaatcagcatttctccacagggacactattaataactaggagttgtgttgccatataagaaaccaaacatgctataaatcacagagtaataaaaaacatgacatgaaaacacaagtcgactataaaattttataataatctagagtaaataataaaattgtgctgtgacaccaataaacagtcttacatttactgtatgcatttattttataaggtatcccactatattatgaatagtatttatgcttataaaattataattctgttgcatcaaaattttacacaaaatgaatctataatctgctatcatattaattgaacttttcattgacattgatattttaatttagattgactttcttggtgtaattgggtgatccatccaggtcattcaaaaaccagcgaatcagtcagccaataacaaaccaattatccaattaagttacaaagcttttttttttctctcaatacaaaaccctacaataagttgacagattcagaatcattcctctgcgattacggaaatacttagattagcaggtttatgataatcattttggcattattttcccactgaaaatgattttaaaacgtaatgtcatttgaccctctcttgccttatcaactctaaatgtaggtaattccatattatttaaatatcaatactaagggagtatcatccatattgatcaatcactaggtaggggccttttaagacatttgtttaggcaaccatcccatagccctctattaagttattgtagagtctagcattaattaattcatatactgagtacttaccttgcgctgggcactgaagatatgtaacaataaacaaaccacacaggatctttgtttatatagggcttattataataattcttcagtgaaataaaagttaagaacaatgacgacattcataattatgtctatccatagttttgtctattcttagttatgtctatccataaaggtttttagaagttttacaaaaaatatctgctattattgttggacatgaccaatgaaagcaaatgtgttttaatatactgaactttatataggtagcccttgtcttttctcattaagccccatcttcaatcccttttccatacgacttgattcagatacaggtctcaatcctcccagccttccggctcttgagggcatttcagcagggtttgaacacagcagaacagtgtgttcacaatcagcatgatgtcttaagtctgtctcaacaattcttcaagggatgagttaaagcttcttttaaaagctattgttcatgacctggtaattaactgtatttatggagagccaatgatgtatgaaggatcctgatggcatgccaacaaactgccccttccctgtggcggctgtggggtgtgagaaagagacatgtaactgcaggtacacattcttggtggcagtacaactttggtctgattcttgtgtccttctaagcaactgtaacttgggttgtgatggaaccaggaaggcaagtgaggacggtcattctggaggaggcttacatgctacattcttcctcttacagatgtttccatagggtcaggttgcttgtatctctgtcttgctcatgtaatccttccttcatatagccagtcaagtggcctgcatagttgatctcagaaaggttcttattctaagatagaggatctgctctatggtgacattctttaaagaataatttttaaaatctataattataaaaaaacatagcaacaaagcagaaaattcaagaacaaatttgttgatacatatttatatacaacaaagcaattagttgtttattacctcagctcttcagatgcttcatagaaccagacccagccactatttttctctcatgagtttgtaatttttattaattttccaagatgagttcagagcatcagtacaagcagcgggtgtcaaggttgagttgtggattcctgatagccttgtctgtggaagtcagctttcctccatctggaggctcagtttccatggtgatatgcactggtatacctgaggtcttctcattgaggggcttggtgaagtgcagggtaactttacaaagaggacatgttaaattccttgaatgaggaaaataacagatcactgaacactcaggattggcctattctccactggatttgaagatttcctactgagaatgatggatgaaaaagggaaggcagaagagcccagattaccattttcatagaaatttccagaataagggagggaagttttgttttcaagtcgggtctgaagtgactgacaagaattggtgaggccctgaggaaagccacagatggattaattgcactctccaacccttgcagttttggctctcaggcacaagagcaggactcattggtgagttccagtgatctgctccaacaccgaatagctggaaataaatcaacagttggcaagagctgtagtgagtgggcttgcctctggctcacaagcctaatacaatacacagtttctgaatacataccaactggcatcatcaagactgtaacttgtcaccatgaaccaggctttgtgggagattattccattgccaatctgatatgctatatatattagagtaattaccaggacattcaaagaaaggacctgttaacagaagatgggttgtttttatattacagatgaataagaattacataaagcaaggccaatttctttttgaagttctagcagcattcaatgccagtgttcctccttcatgctttggctctttccagaagcactaaagggaattgtgtgcttgtaatacataccacttatgcataattccttttgaaaatctgtctttctgattctcagctttcagagagttggccagcccttccaatgccccctgcagttcaaaatgtagtttataattttccttagccccccatgtttgtgagggaacaaaaatatggcaaagaaatatacttgaaacacacaaagaaaatcaaggcttttccaggctcaaggaggctgatacactttttgaatctcagatgattggctaaggattgcattctcagttgtgtttctatttaataattggcttttctctccatccttgacaattttttccctcaagtcaaacttttcttaattatcctagtttatcaaatatgtgttgtttttcctttaagtatttccctttcaatgcactttacagaagcatcatgaaaagtgggaagaagcaattataatgaaaagcattgtaattttatctaatatttaaaagcaatgatgctgctccaggttaagactgtaatcagacataattacttaagacatgtataccttggaaatattgtggggtcggttcagaccactgcaataaagtgaatattgcagtaaagcaagtcatgcaaatttttcggttttccagtcagtgcctatgaaaattatgtttacactctactgtagtctaagtgtgcaacagcattacttctaaaagaaaagtacataccttgatttaaaaatgctttattgcttaaaaatgctaactgtcacctgagccttcagcaagttgtaatctttttgctggtggagggttttgcctcgttattgatgaccttgctgtggattaggctttggcttaagaggctcttgcggctggtttgagcttctatccagaccactaaaactttctttatatcagcaataaggctgttttgctttcttatcatttgtgtgttcactggggtagcccttttcacttccatcacgaacttttctcttgcattcacaacttgactaattggtgcaagaggcctagctttccgcctgtctcggcttttgccatgtcttcctcactaagcttaataatttctagctcttgattttaagtaagagatgtataactcttcctttcacttaaacacctagaggccattgtagggttactaattagtctaatttcaatattgtgtctcaagaaatagggaggcccgaggagatgaagagaaatggaggaacagccggtcagtggagcagtcagaccacacacaacatttatcaattaagttagctgtctcatattggtgcctcaaaacaattacaacagtaacatcaaagattactaatcacagctgggcacggtgggtcatgcctgtaatcccagcactttggaaggctgagatgggtggatcacttgaggtcaggagttccagaccagtattgccaacatggtgaaaccccatctctactaaaaatacaaaattagctgggcatggcagcgggcacctggaatcccagctactcaggaggctgaggcaggagaatcgctggaactcaagaggtggagtttgcagtgagcagagatcttgccactgcactccaacctgggtgacagagtgagactctgtcttaaaaaaaaaaaaaaaatcagtaatcacagattcacagatcaccgtaacaaactgaaatatttcaagaattaccgaaatgtgatacagagatacaaagtgagcacattgtgttggaaaaatggtgccgataggttgctcaatgcaggcgtgcccaaaaccttcaatttgtaagaaatgcaatatctgcaaagtacagtaaagtgaagctcaataagatgaggtatgcctgtatagttcccattttccttctttaaactcagctgatcttgttttgccaagcgtgtcaatctatggaaacacaatcaccttacccttttaaatttatattttctttttttcacttattaaatccaagaaagagaaacccagggagctggtaatctcaggaatttaacacagcattggtgtaataggagagcctagagagaaagcaatgaagacagagaagtagcaatagctgattcaaaattctgccgtgatgcctggtttcagccccaccaccttgaaatgttcatcaagcatctattttcatgcttgtgcataacaacagctcacagcaccagagctacaggttcagataacaacaaaggtgatgtggcagctggattactctgagaatgagaacataacacacccccaaagtaataaaatttcttattaaaagggaagatatctttaaacaacccttcatgttccccctgagactgacaggcaatttcaactgtttatttttatttagctctgatgaatgcctctatttcattcagcttcataataatctggtggtgctcgctgctgctggctccgagtgaaagtgtaagtggagggcgtcattagaggcattccatcgcattcttggtgaaattagattctttggaaactaaatcaagccttagtttcatggaggggaagctggacaagaggagagtaatgtgcaattggttgaattatcccttgctttcaaggcattagacaaggtcagaaaaccaaagtttaaattatattttcactcatgtgtgcactctgtccgtaataactcgttaatgagcatattgatatttatgccatgtctgtttccttttagggatcacattttcattatattgtgggcatacaaatacagtgctatttagtgaattgctttattctctctaactataagtagattttaagtacagcctagcaaatagtaaatgggcccaaagaaaaaaactatttttgtctactctgtcctcccttctgattcaagtatgtttagtggagtttcctaaagcagtggttctctacctctctccttctttaggacacacatgcaggagtccagtccatttgtgtgatgccctgctgtcatgccagtgctgaactgttcataatggaacacaggaatcttgctcatcctcactcaaaatcctcccgtgacttcctatcctcagtgagaataaaatcaaaagctttaacctgcctgcttatcttccaccttcattatagtctagatgccttctcctgccttctgctgaagccatgctggccttcttgcttctccggggtgtcaagcgtgttccagcctctcggcttttctatttgcattcctccttacctggaaacctcttttcctctattttcagatgacttgttttcttactatatcaggtctctgctgaaatgtcatctccctggagaactctccaaaacgatcccttttaaaatggttcatcaaccccaagtcattctttacctctcacctgatttatttctacaggtcagttaccttcatgtgaaattgacacctatgtgtgtgtctgtgtgtgaatatatatgtacgtgtgtataatttcaattaatctttttcaaattttcccaatataaaataaactttatagggatttgcctgtcttactctctactgtaacctcaatctctggagtagcaccaggcacataatagagttcttcatgcatttgggaaatcatgaatgaataagaaagacaggcatggtgctgtggtggggatgttctaattatgctgattagattaccagccaaatacctctaactctgcccttcactctcttattcaagaaagcatatatgaacataaatgaatggcagtaatagcagaagaatatccttgaatcctttgccatttgttctttttttaaaaaccttgacctcaaactgtattttttgaatttcactggtaatgagttacttccaatagtgatagctacatgttctaacatctgtctcaaagaccccatgttgagaatgcaagtgtgcccagatcagggttccaaacttgtgttctattcctttgtgaacactttaattacctttggattcttaggagatataacaactagcatcaagcatccagcactagctcattgtgaagccactaggaaatacacagatgagtgaatatgctactctgattccaaaacaagccggccaggctgggtcagctcagaaaagatgtcagtcagtccccttgtgtctcattaaaaggtctgcctagatcagtgtgctaaattttccaaacgcaagaaacctggggcaatatttcggttgatgcatttgacatctcctttaagcatttcattctttgcaaccgagtatacaaacataatgaatagggttttttaatgctaagagaaaaaattgtacgtaggaagataagatattctgggtacaggagacgttgcagccttttctgtgcattagcattggttcagtgagtacagtactgtggacatctgcaacaaccttgggtataggattctctaggcagctctctcagagcatgcaatactcctcttttcacatgcctggcacacgcatgtaaatgtttgcaatattcaaggaggtgctgccaagatttggtgacaacaggcattgtggaattgctgatctcacaaacctgaagcattgtaaatattgacttaacaataatttggactgaggtgttactaaaccctgaaagcaaagcccccaagaattaaggcttgccataagagggagcatttggcactttacccaaactaagtgttggttcagtcatatttttgtactatcaaaacctaagttaaattaccacctaattagatgagtcctcttaggagcacaagagaaagcagagattgagaaatctctgggaaaatccaatcattatcacagagagtgacaatgcacttgtgtgttttcttaagaaaccaggtttcacacacattttttgtatcaatatagaacattaaatttctaaatttggtattgctgagtattacagacattaagataaacatgagtgtgtagcattaaaaaatataaaatgtgtctgaagccactgtgtctaaagaatgggacattcaatatagtttacatattaatatatcttacaccaaggtagcaattccttcctggagcacaaatgcatatgatttgtatgccaggtttttcctctgagtgtttgatttgatctccttacataatactgtaatgcaaaccagattcataatcatctcagttccagctgaagaaactgagatccacagaagtgaagtgtcttgtccatccactacgtactaaacactgaggccacgggttagaccccaagaaacattcttttttttttttttttttgagatggaatttcactcttattgcctaggctggagtgcagtggcatgatcttggctcactgcaacctctgcctcccaggttcaagtgattctcctgcctcagcctcctgagtagctgggattacaggtgcgtgccaccacacctggctaatatatatatataaaataataataataataataattattatttttttttttgctgagatggcatttcaccatgttggccaggctggtctcaaactcctgacctcagatgatccacctgcctcggcctcccaaagtgctgggattacagccgtgagtcaccgtgcccagctcccaagaaactttctatttccccttttgcttgcagcagtttttggtctcttcatgacaaaggagagataggcagatgcattccacatttcttcctgtttactcaatacatttcttatgtaacttagatgttcctcttcgtctgatttgcgatgctgggtgcttggtgagcatgcatatggagaagagatatcctactgttcccacgagccaggagtgcacagaggcagctgcaccatttacagcctaattggcagcatcgtagatcacaggatgcccaaagttcactaggaggagataaagttgtcagagaggacccctgaagagatacatcaaatgcttcttccttctgcctctctcgataacgattccgactatgtattacaggtttggggttgttatggtgacaggatgggaataacttgggaggcaaagagagaaaataagttgcacagaaattcatctttaaatcctttggatgtgagacaggtttgaaatagtggtaaacctggaggatgtacaggtatgcattagggtgtagagtgagtgtgggcattttgaggttaagttttcaaatttttttataaaggcaaggatgtgtagagcctaagagtgtaaattctgaaattctgacaccagaaagtcttgtttcaaagctagcttccatcacttacccgcctgtgcaatcttgacctggtcactttacctctctggacctgtaaaatggtgataatcatcacatccattttataagcttgttttgagtattaaatgagttaatgcatggaaataatgccttgttcccaataagtggccaatgcattttggctgtccactcttctggcttatctactcttaacttaagtactatgtaataataaagtcaatgcacttttttgcttctccacttttacatactattgtaaaaagagtacataagattattttgtatttccactggaggtagtgcagtgtctgagactcatggaagctctggagtcttatccagtcctttcctaactgcatgactttagggaagtcacctaacttctccaagtttcaactttctcatgtgtgtattagagatatttgtagtggatatctcataaagtattgctcaaataaggggtaagccccctgtaaagtgcttagcacagtgtctgtcaccttgtaagtactcagttgatgacggctgttttgattattcaaggaaactatgactagggaggtggcaggatactgggagtggggtgaattagtctaataacattattcgctattctgcctgcagcatcatttttcttctagaataagatttcccactgactaaagaaagataatatataaatttttcctttctccactctaaaatactattattaaaagagctcatataaaaagaatgcatttataaaaagaatgtctttatcactctatcataagtaattctgaattatgatgatgattatagctatgagcacaattaaaaatactcaacaactatcaccggtcaatagagagtgaaaattacaccatatgcaaaaataaattcagactagattaatgacttaaatataagacatgaaactataaaactactagaagaaaacatagaggaaacaatccaggacactggtctaggcaaaaatattatggctaagattgcaaaagcaatgacaacaaaaacaaaagtagacaaatgagaccatattaaacaaaaaaactgcacagtaaaggaaataatcaacagagtgaagagacaatctattgatgggaaaaaatacctgccaactattcatctgacaaaggactgtatccagaatacacaaggaagatgactcaacaccaaaaaagcccaaaataatcccattaaaatgtgggcaaaggatacgaatagatatttctcaaaagaagacagacaaacggccaacaggtatatgaaaaatataatcaacataattaattattaggaaaatactaatcaaaaccacaatgagatatcatcttactgcaattagaatggctatcatcaaaaagacaaaaaatagcaaatactgatgaggatgaggagaaaggggaatttttatacactgttggtgggaatgcaaattagcataaccattatagaaaacagtatagcgatttctcaacaaattaaaaataaaaataccacacaatccatcaatctcactaccaggtatttatccaaaggaaaggaaatcagcatgtcacctgcacttcctagtttattgcagcactattcacaataaccaagatatggaatcaaccctcagtgtccaacaacagattaatgggtaaataaaatgtggtatatatacacagtgtaatactattcagccataaataaagaatgaaatcctgtcatttgcagcaacatggatagaactggaggtcattatgttaagtaaaataagccaagcacagaaagtcaaacattgcatgttctcacttatatgtgggagctaagaaagtcaatcccatagacaaagagagtagaatgagagttaccagagactgggaagggaagtgtggaatgaagagaggttgattaatgggtacaaacatacagttgaatagaaagagtaagttctagtgtttgatagcagagtagggtgactatagttaacaacaatgtactgtatatttcaaaatagttagaaaatatgaaatgttaccaacacaaagaaacaataaagtttgatgtgatagatattctaaatatgctgatttgatcattacgtattgcatgcatgcatcaaaatatcagatgtaccccaccaaatattcacacttattacgtatcaataaaaaaatgataatctggacacagcttgtgccagagtaaagaaatgctcaaagaagaatggggacacattggaagggcacaggagccaacttaaagcaactctatctggtcagatttggtacaatttgtgcatcaaaagagtaataactgtattataagatgttgcatgaataaaagttcatgagtacataaaactactcataaaagaaaaaataattatagagtgaaaaattatagatattgaaattgattaaagtacagcgtcttttaaatccccattaccatcaaaagcgaaaacaaattaaaattttgtgatttcatgatcattacttaataatagtaaattgttagtatgtataatgcattattgttcctaaccattcactgccttgcaagaggtagaacatactttactgtttcaatagtgctgggcttggccatgtgactttttgatcaatggcaggtagtgacaatacactgcttctaagaagacacctgagtcatcttggtattgcccctttctcgagctgctgtcttcctctatgccagcagcgcaccctagagaatggttacacattcataggggtcatgtggaaaccaactggaccaagccaaacctggcaaaatcacagcagacctgcagccaccatgaaatgggatcaataaattaatgtttgcttttgcaaatcgctggtatttaagggttgtttgttgctgcagcaaaagttgaataataaatacagagtcatttatacagaacctgttatgtgcccaatatgagaaaatacgcttaatgcatacccaacccaatatttagttggctacgcattaaacatactccctcattttgtcctctccctattcctatgggttaggcacgattattcctatttggcagatgagtgacagagtaaaaattgttgaataatttgctacataacttattagggatcagttaggtattcaactcaggaccatttaactccaaagtctggagtcttagacaacatggtgtactgcattctaaggatggaaatttagggaaaaccctatgttgactttaaagtgaaatatgggtgaatcccagccattccatatatttcaaccatgtaaaacaacgcacattatattgtctggccaaatccaaagtaaataataaatgttgacagacaaaaaaaatttctgggagcaaaccttttgagaaacagaatttacttaggtgactcagacatatcaaaaatcacactgaatcaatcccaaatgatgtacattctcacgaaggaaaggagccagatttttagtctaactcttctagattcttagccctgtctccatggccctttctacataaatcctggccttaagaaaggcttctgggcctccttgactttctcttcctatcccagctttgacgatttctctccatttgagaaatgaataattcagaattagaaaccctacttgagtcccaccactccccagcctcccagcttgctcatatcctcattatgggaaaagctattccaaaaggcaaacagcttttcataattgttatttaatggatattgcctgctcctgggatttctttctcagtatctatttgtaattcaaaggtcagcgtaataccactggcacacacaaggattctgacagatttgttcctcctgattgaaattcagatacagaacccacagtgacacagtaggtttgtttaggagtctcttctgtggtgtaggtcacagttaggatgaatctgacctcatcttaattctgtgtcttcactagtcactaagaaaactgacctatgaatgtggaatatggccaggagcatttgttcactagcctggcatagcagggatgtcagcaagtagaaaagctaggtctactatggttattatccctctccttaactggccctaatatcacctaaatgggttcctcctaaaggtaatttaagcagaaaaaggtggccccagagagtaatttaggcctcatgtatgtacatatttgcaggatttatatggcaagctatgcttacattattaatggcagtcttatttcaagatactatatattgaaatactattcgacaagaaagctattttccaagtaggcatggatgatgattatttattagtttaaaatacatcccttcttcccatctcaccaaacaccacttccatttcaaataagcttgaagctctcacacactgcagtttatgcataaaggctggctgcttagaagcactcatggcttgtgatacaagggagtaaaatcctaccataaatttcacagtatttatgatagacacttgtttacttcaaaaacagagccaaattaaaaatcagaaaggacaaattctagggctaccagcatggtttctatgttgtgtgcttgtgtgtctgtgtgtgtgtgtgtgagagagaaagagactttagattttcttctttctatttttatttgatagcgtgatatttcaagttcactgttgaggttatttccaatcaaattgcattcaaccctggaacaatgtataggttgtcagcatggatgccagtggagggtataaaactaacttctataaggtcatcataattcctcctcccccagagaaaatctaacagcaattgtgaggacagaggttcgaaaggagcagtcaagactatttgaaataaaagctacgagaagaattcagattttagaatagagcaagcaaggtcaagggatcaagtttccgtatgagaccctgacccagatgacagggaccgcctgcaacattctcccacccccactgcactttcaccccatcaagccctcaaactggattgctgatctttgttcaaatagtagcttacacactgagactaagatgagtctgaagcagaggctaggcgttctgttttttaacattaaatatataaagactttgaaagatgtgaccaaagaaagctgtcttttcctggagcttttgaaaaaaaaaaattaacagcaactgcaactgccatacagagtgcttgccatgtgacagatagaagatcattaactatgtagtaatcaatcatttgcacacatatgtgggtccccatgggacacaacatttattatccagttaatccttgaaaaagtgtctactctcactgtttccatttttttcttcctgctctcacttccaaaccaattagattttcaccctcatcatttctctgttactgtttttatcaagatcaccatgggcacctgtggtagtaaatccagtggtcatttctcagtatttatctttcttgacctatcagcagcatttgatgtactattcttttcaatgataatgaagaatgaatggaaacctgagaagtttcctgggaaattatatttagaattctctttctgatgaaaattgtaaagatacgctggcaaaaataggtagcagaatggggaggaaaaaagagtacatgaccagaaatcatgggcgtgagatgtgtggctaattagggctgcaggaaaatcactgcaagagagtgatgagcattgctgttacactactttatcctatttgcttgtaggaaaattttagactctatgggactatagttctccctcctagtgctaattaaattaaagccatcctcatttttgaaaaggggagaataataataggtatgattattaaaatttattatgcactaggcactgatttaagtgacatacatacgttaattgatttattactaggcaatcaggatttgtatcctaattttacagacggcaaactgaggcacagggaggtcaaaaaccttacccaagtttacccaactagtaagcaatgtgccaggatttggatactgggagaataataaccataattcctaagcccacagtgtttgtaaataccaacatatctactcacttgaaactcctgagcaatatcctataaagttgagacccacaaaactgttaggagcaccaaccctcccaacacacagtaaaaaaaaaaaaaaatccatgtataactgttcatttccccaaaacttaactcctaacagcctactgttgaccaaaggccttgcccataatataaatgattgattaacacagattttgtatattctatgtattagatactgtattctttcaataaagtaagccaaaaaatgtgaagaaaaccatgagaaaaatacatttacaatattggactatatgtacctgtgctgtaagtttacattgtctgtttataagatgaattgtctgcaactgcagttgcaggcctcagtctatggcacatatcaagcaattcaactttttcttgtagtgttgtgacatttttctgcttctttggagcacttccagcatcaccagtggcactctgtatgggtcccatgctgttattaaaggtttacagtattgcactaaacaggatgaaaaacacatgagaaccatgagaggtcactttttactgaggttcacaatttactgaagacaggaatcctcatggggagatattagtgtcacaccatgttttaagcagatattcgtaacacttaagttccctgcaataggaaggaggtggctacaaaattattaccgtagtatagtatgtacaagagttataatctgcatctttatatttgtttacatttctcgctattgcaaatggtgccatgtatggtctgtaagtggttgtgtaagtttttataaattttaactttttataatagatttgtatatagtttatggttgtaagtgataaaatagactagtatctattttatcatacattttatgtactcatgacacacaactttttattaattgttaaaatacttgtaggctatgcaattcttctgtaagcttttccaaattctcacaaatctccaaaaatttaccaatatattgaaaaaatatttgcatataagtggaccaacctagttcaaacttgtgttgttcaaaggtcaactgtacatgtattgggattcttttgaggggaggtagtttttaaaatttgagtctatttttaaaacttcagcctactgatcaagtgaaggcatcaggaaagtgtttctgtaaatggttgcatagcatatattgtagagtctctgggccatacagtcactaatgcaaccattccactctgcaatagtgctaaggcaaccatagacaatatgtaaacaaaatgggcatggttgtatttcaataaaactttatttacaaaaactggggacagaacaaatttggcttatgggatgtagtttcctgacccttgaatattgtagtagcatggatgttgttgtgttaagtaatattctgtctaataagcatagcccaaagctgtttcatgactttagcagacaattctactttgttccaatgtacccatgcttattttcttttttgaaaacaaaacccataattttttagatggacttatgactgctcagaatagacggcccctcatccacaaccccttgcaacaagctgtttccatgtgacaagttctggccaatgagaaataagtaaatgttacatgcacatcttctaggaattatctataaaagaagataatctcctctttcttgtgggttaatatatggatggactttctggagttccagcagttaccttggaccacgtcacctatagaataaaaccacacacaatacagcagagagatcaaagaaaactaagctcttcaacatagggcaccaagacatcctcgatctagacttcttttatatgcaagagaaataagcctctatttttactagcttgctactatttgggttttcaatcacactcagcctaatctaatctttcctgatgcaatgaccaggtatcaagtacatcactaagttgcacttgttctaaaatatcgcaaaatggcaggatgagaaggggctgggacctcagaaaagggcatggaacttgacattgtaaaacctgaatctgccacttcatgtgtgatcctggataaggtgcttcaacatcactgctagtttccttgccaataagatagggttagctccagctaatttgcaggtgtactatgaaagaaaaatgaaataaaatatgcgaacatgagagacaattatttactccaatattggtagaatatgtgtatttaaatatgtatataaatatgtctgtaactacataatttttatgataataggtataaatatatatgcatgtatatatacatatagaaggacagaaacaacactgatgtattaactttagttaccttggcagggtaagagtaaagatagtatgaggggagatttttaatttgacctttatagagctatgtatttattacaacaaatttatttacaaatcaaaataacgaatgtaaataagctatatattcttacatataatacataaaatataatgtaaatatacataaatgtagcttagtataacaccatacaaatttgaagctcatgtttcttgaaactggatatgaaaaaccataagaaccatcagttttggaaataattatttttttgatcataagtggaggaaagaatgtagaaggaggaaaattttagacaacttgaccaaggagtactcttacaaataaggctgatctgaatatattccaaccatgctgtaagatttaaagattttctgaaggtgcaagatatcttttatctctctgtacattgacctatactgttttgttttaacctgtgctatttcttgcttaaaaatcttttgtgtatctgttaactcaaactcctttggcttttcaaagcttctttcagctctcccaagcagaatacatttcttcttgaatatatatttatatagtcttagtggctgcatcttactttggaataaagtagtatttttagtttaatgggaataccatggagggtcataagaagacaaagaacaaggagtctaacaggatcccactaacttctctgtggagaacagatataatggggcaaggtcaaaagcacagaatcaggggaattgcaatttctctggtgaggggtggtggtgacttgggtgatggtgatggtgagacgtggtctgatgctggatatattttaaagacaactggaaattaatatatctaattatacactataaatatataaatatatcctccatacacgataaacatatttgttttaccatctcatcattatttatttatatacttttattccaaagtaagatggggcctctaagacattttctgtttaccattcattcactgaaaacatttttgtgagtgtctcccacacctccggcactgtttcacattcaggggttatcatagtatacaaatagacaagcaacctcttttcatgaagcttacatttcactaggggagacaaaaataccaatgaaaagttaaacatataaaaaaagtcagatggtgataaggacgaaaagaaggatcattgtatgggaagtgggcaaggaggtgctttttagacagaatattcagaaaaggcatctctggtcagatgttacttgcacagggagctcagtaaacaaaagggtgggctttctgggggagaaaaaaccttgatgcaggagcatgtggtcaggttaaaagaactgcaagtaagttgaaaagactgcagtgaatgtggcgagaagtcattgcacgtgaattcagaggacgagaatcgagatggttcagggactgctaggtcatggtaaggatttcgccttatttttagtttaatggcaatactatggagggtcataagaagacaaagaacagccggtcgactttaacagcatcccactgacttcgctgtggagaatagatacaaaggggcaaggtcaaaaacataggatcagggagattgcaattgctctagtgaggagtgatggtgacttgagtgatgttgatggtgagacgtggtctgatgataggtatattttaaaggcaactagaaattaatatatccaattataggaaaatgtttaatatattattgtgggaagaattaattattttaataaatgattaaagattagagccagagacacttatcatttaagggatgattaaagaataattcggttcctaaatgaggaatcatcaaagaagtaaaaaggatgttgtgtgtttcttggattcttgtttaaaagttacaatttctttttttagaaaactgaagtttatagtggcaagagcaaaggctttaaaaagcaggatgggggaagactttatgctgtatttctaagttttaaaacaatagtgcattatgatattgagagtatgacttgggtgatttagaagttagtgatgatgtaaagaaagcaagattattttttcttaatacaactgaaaacatagcttatattaacaagaaacaaactcatcaaaaaatttacagaatcttgatatctgtgatgctagagagaaaaatattctgagtatttgtgcactcttttagatgatatatctttgaataacacatgaatatgttaatactatgtaaatgatgttttactggctttctggttaaaaagggtaatgcagctacatttgatcatgatgggctattttgctagtaggatttttaagtttctgtgaatcattttaagagattacataaaagaaaaatatgaaagctgtacaaatgatcaaaatctcacattattcttagagaaaaggagtactggtctaaatagaaaactttgagaaatatgttttctaaattactgccaaatactatcctttacataatttttaagtctgtaatgcacaggcagtcagattctggatcacgatgattgtttagaaaccagaattgttctgaaaaatcgtatttgaatgctattttagggagtgatcctctctctccccacacaaacctgcctggtcttgtttaaaaggaatttctgcttcttttagaataatgtaacaagtaacttggagcctcctctgtgcctccacaggcactcttctccaaaggaaggtagtgacatgggataatgagactgagaaaagtgtaatgcacagagcttgggctttcttcctgccctctgcacacacttttctctcttcctcataacaaaattcctgggtgacgatctgtatattggtcattactatggggaaggttgagtagcaggaagtccatttgatcacgtttccaagccatggcctctactcaaacaccactactgttaatctccatctatttgatacctgagactctctctcaattggctcagatctcaaggtgggtatgagggttacttttatgtgtcaactgggcttggcctcagtgcccagatatgtggtcaaacaatatactgatgttcccatgaggttgttttcagataagattgacatttaaatccatggactttgagtaaagcagattattctctataaagtggatgaacctcttgcaatccattgaaggcctgaatagaaaaaagactgacccccttgagcaagaaggaattctgcagcagatggccttcagatttaaaaggaaacagtgggtcttccctctgtctctaacttgccaggccaccctgcagattttgggcttgccagcccccatgattgatgagccaattttacatagcatgtgtgtgtgtgtgtgtgaatacatatgtatatgtatagtatgaacgtatataaatatatatacacatatgaattcacatacacatatgtatatggagagagagagagaaatttattgattcttattctccagagaacactaacagagggttactcagggatagagggacttaaattaattattcctccaatcagagtagacaatattttcaaagtatcaatagaagaatcacttgcttgtattataaacctaagcaacaaattcaaagtcttctacatggtaccaacatgtctgagatcaaagatactctcatgggaccacatgcgtttatttcaaaaacacattaagtagtctttgtgcaaaagcatgttattgtgataaagtgattcagctagatcatgaggctaaaaaatcacccattttgataaacttttcaatttgttcaaactcatcttcaattaaaaaattaattatatttagggctgcttaactggttaattattatcagaaaagcctaacttaataaagaaatgcagtgagaatcaagttgaagagatatacattgctattttaattctgaaaataccacacattttaaagcaggtggtattttgaactcaggccctagacaaaaattattcttgcaattttaagtaatattaaaacctaatagaagaacagattaatggaaaatgagagttttatgaattcaaatatatttcataatatttttaaatgctcaggccatgatgagtcaacggcaagtcatagtaagttgcaaaagcatgaaaaatgttaggtgcttcaatgtttatgaagctgtatggcactcataagtccagatttgatataatgttcagccattgcagcaagtagggtggacatctcaggtttccccaaatcctattttgattaacacatgtcataactgtcgtaaatgactcaagagttacattttagatcaacgtaaaaagactttaatggatctaccaaatggtgattagtgaaaggaggacatatgagaaaaaatctaaaaaatgtgtctggtagaaagggggaatgaaagaaagggaaataaccctgattccgttacccattgctgttcaagtaaacaccccaaaacttagcgtctttaaacaaacaaacaaaaaactattttgtttgcttactattctcaatttgggctaggttctgctggatggttcttctgctggtcttgccagtggttacttgtgtggctttatttagctgatgggtcagttagaggcttgaattggctgggccactgagttttttgagctcatgtctttctataatatagttaggatctctctctctctctctctctctctctgtctctctctgtgtgtgtgtgtgtgtgtgtgtgggtgtgtgtctaatgaaacacagggtgtctctattaaggtaatagactttctcacatggtggctcggggctttctagacaacaaaagcagaagctaccagacttttttaaagcttagtcctggaattggcacagtgcatattctgcttccttctattggtcagggaggctgcccatattcaagaggagggcactacacaaggaagggcatgattaccaggaggcatggtttactagaagtcacttacataacagactgccacaaaccctaaatcatttataccgaaaaaccttagtaattgatttgggtgtagataagcctatgttttaagtagatttacatgttgctaaatgaaatttaatattataaatgaatagagactttcctaggagccttgatattatttgacactataaaatgcaggaatggtgaaagcactttatattatgtattttccttagttctttttattatttgtttgtttgagacagggtctcactctgtcactcaggctagagtgcagtggcaggatcttggtttattgcatgcttgacctcctgggctcaagcagtcctcccatcttagcctcccaagtagcagggactgtagctgcacactaccacacccagctaattaaaaaaattttcagagacagagcctcactatgttgcccagaatggtctcaaacctctggcttcaagcaatcctcttgcttggccttcaaaagtgctaggatttcaggaatgaggcatcacatccagcctcctattttctttagttcttataccacctattgataggtgttcaaatattagccccatttacagatgaggaattagttcagtaatgctgaaaacttgttcaaggtcacataacagagcgatattcaaaccaaaccagttttactccaaagcaaaccttttaactcagctcttctaactgtaatagtcttaaaaatctggtttccaaaatttcaggggtctactgccatgaagtcaactgattctcttttttaaggctgatttgaacgcctttccaatgtagcttaatacaagaaggatgaggatcctgaattaaactccacagctgtgtttacatttcatagaaagttgtttcctaggtaaaaacggcatgcattagtaaatatctcaccacatgctgcagtgacctctctaagactctaataagaaaaaggcttgctcatattcatcacttttaaaaggaacctgtttctggaccattatatggaagtatattcttcatgtattacactcttcaaattcttcttgaagcaaagggaatgtatctcagctaactttggacgtcttcataacatgaatcatagtcaggtgtaatattttatgtatctatagtaatggtgataagctctgtggagtcagagaatgtgttatactccgtggatcctccaactttgaacaccctatgagaaccaagcaagagctcaatgaacatttgttgaattaatgtttgatggtgacaaaaatagctacatatttttctatctgtgttagcaagcagtgccactcagtatcatttccctcattctaaatgatcgattctgccacccgagcagaaacacaatgagctgatgcagatgaatttaagaagcctttgaggacctctctgccatggaatgttgcctgatagaatccaatgctacatgctgtcagatatgaattattcattgacacttcactcctacatcattatacctttcattctgctgtgtctgcacagataggattgattcacacatcacatccagtaacatttataatcagaaagaatagaaacattttcacagagaagaaaacatgtaagaatacacttaggataatcacactagtaattggttctccagcttccacctaagcaagagatgtgctggaagaaaaaaaaaatgtgttgcttcttgtcaaaatagtcattgtttaagcagtaattcccaaatagaaacacctactttcacacaaggcctaggaaatatgaatcattttgtgaaatctgacaccatatgttctaaaatagggtactttgctggcaatgattgcaaagcactggcttggaaaatctacacataggatctttccaaccatggaaatgtatgaatcaagaacactgttctgaattaattatcattgtgtgtatgtttgtatgtgtgtgagagtgtctgtgtgtctgtgtgttgtttgtgtttttcatgggaaataaactcttgattaagcattagatacacacccacccacctccccacacacacacacacacacacacacacacacacacacacacacacacacacacactcacacacatattcttatacaaaacaaaggagcagaaataaaatcagaaccaatcctggatttaaagaaaatgtgatagatccattccacttcttcctttaatttctgttctgtttattcaaataactgttcattgaggaactgctttgtgccatatagattgtgaggtactggaagtagagtgatgagcaggatagatagagtgcttgctccatgaagctcagagtcttataaccacagcatgtatttaacctagtatatctccttaaagtttattttcattgtgtcctaggaagttttacaatctttcacataataagtgcaaggtaaacatacatttaatgaataaaattcataaaatttactgctatagaaataatttcagttcataaatttcagatattacaagtttgtaaatactgatcagaacatgattatttatgctactggccaatgtgtctgatgaacatagagattccaataaagatgaaaatgtaagaattcaaggtgatgaaatagtgcaacaatgacaaaaatatattaatgatattaatttgaagctaaatcacaaacaaaggtcaccataatcattcagttgggaggggatattttaaaacacaagcagaaaagcaacattccaccttgtctatatggacattttaaaaatgcttatggtgaaaatctgctcatttaaggtgtgtactgtagcattctattactaccatttattacaaaagataaaaatattggatactgaagcagtttcggtagattttgctgaaacacataatagagctagagacaaatgtttgtgcccaaccttcataaataaggagtgagaaaaggcagaaatgtttgagcagcccacttggtactgtctggttgggctcttctttacttctgcagctttgactcccaccattcccatctttcagtcccattggcttccttcagttccccaaatgctctctgctcccacccactaaagaacttttgcatacgctatgccttctggcagaaatattctatctaccccctgtattcgtccattctcacattgctataaagaactacctgagactgggtaatttataaagaaaaaaggcttaattgactcatggttcaacagaaagcatggctggggaagcctcaggaaactttcaatcatggcggaaggcaaaggggaagcaggaacatcttacatggccagaagagaaggaggagagtgaagggggaggtgctacacacttttaaacaaccagatctcatgagaacttactatgataggaacatcaagggtttggaaatcagcccccatgatcaaaacaccacccaccagacccctcctccaacaccaaggataaaaattcaacatgagatttgggcagggacacaaataaaaacataccattctgcccccagcccctccaacatctcatgtccttctcacactgcaaaatacaatcatcccatcccaacagttccccaaagtcttaactcatttcaacattacctcaaaaatctacagtccaaaatctcatctgggacaaggtaagtccctttcacctatgagcctgtaaagtgaaaaacaagttagttacttccaagatacaatggtgggtacaggcattgggtatacacacacattccaaatgtgagaaatcagctgaaacaaaagggctacaggcctcattcaagtccaaaacccagcaagggagtggttaaatcttaaagctccaaaataatcttctttgactccatgtctcacatccaggccacactgatgcatggggtgggctttcatggccttgggcatctccacccctatggatctgcagggtgcatccccctcagctgctttcctggactggtgttgagtgcctgtggcttttccaggtgtataatgcaagctgtcagtggatctaccattccgaggtctggaggacagtggccctcttctcatagctccactaggtattgccctggtggggactctgtgtatgggctgcaatcccacatttttcctctacattgccctagtagaagttctccatgagggctccgtcactgtagcaggcttctgcctagacatccaggcatttccatacaccctctgaaatctaggcagaggctctcaagtctcaactcttgccctctgcacagccacaggcttaacagcacatggaagccatcaaatcttatgggttgtacactctggagcagtagcctgaggtgtatctggggtccttttagccatggctggagctggagctgctgggatgcagggaacagcgttgtgaggttttacaagacagtagggccctgggcccagcctgcaaaaccattcttctctcccagccctctgggcctgtgacaggaggagatgcttccttcaaggcattttttcccattgtcttggccattaactttgacttctttttagttatgcaaatttctgcaactcgcctggattcattcccagaaaatgggtttttcttttctaccacatggctgggctacaaattttccacttttatactctgcttccctttaaaatataagttccagttccagatcacttatttgctcacaaagacaaacataggttgctagaagcagccaggtcacttcttgaacattttactgcttagaaatttcttctgccagatatcctaaatcatcactctctggttcaaagttccatagatctctagggtaggggcacaatgcctccaacttctttgctaatgcataagaaaagtgacctttgctttacttcctgataagttcctcatctccatctaagaccttttcagcctagacttcattgatgatattactatcagcattttggtcacaataattcaacaagtctctaggaagttccaaactttccctcatattcctgttttcttttaagccttccacttttttccaacctctgctcattacccagttccaaagtcacctccacatttttgggtatctttataagaatgccccactcccagtaccaattttctgtattagtcagttatctcattgctgtaaagaaccatctgagactgggtaacctataaagaaaagaggtttaactgactcacagttttgcatgctgtaaaggaagcatagctagagaggcctcaggaaccatacaattgtggtagaaggtaaaggggaagcagctcatcttacatggctggagaaggaggaaaagagatggagggtaggtgctacacatttataaacaagcatatctcatgagaactcactcactgtcatcagaacagcaaaggggaagtctacctccatgatccaatcacctgccaccaggcccttccttcaacatgagatttgagcaggaacacaaatccaaaccatatcaccccctacccatacacacaccacacacacactctctcaacaaggtggctcccaggcatccttcagatttcacagcacacaccactccccttggaaaccatttcttaactgccatgaatatggagaatctccatgctttcacagcaccatgaacttctccatggcatttatggcagccctgatttgaacatatacataacatacacataaatacaattttatgtataaaattaatttcaagtaaagtgctttatataattgtatacaaatgtattagtcttttgcattacaaagggtttattgcaaacctatcacatagtaaactcttaaggtaggtttattgaagaaagaagtgaatgaattgaaagagagatacattagggaaatcagatagtattatcctaaattttgaggaccaagtatttttgcagttttagtatttttttagaacaataatttgatcatttttactaccctcggttgcaaatacattaatttctcccaaaataggaacttggaaggaaatttattttttgaaaactattaaacagaagtggcaatattcttatatatatataaaaatatatatatttatgtattacatatatattatatatgtaaaatgatggttatcgagataatagaagagattattcttctgcactataacccattaccactactaaccatcagtgaaaatatactagagaaactgatggatctgcttccttcaccccccactttgttcttcacttcttggtcattcttctgtttacttggccttcacttcctacttggctgtctaagagtgataaagagcatgggccttgaattctggcagagctggattcaaatcatggctctggcagcatactctaccccgaaacttcttcacctctcagctttctaatatataacatagcaataaaaattatacatcatagttcttgaaagtgtttaatgagttaacatatattaattgcttagcacatttctggcattagtattaatattattaatattaattaatattcatccaatattaatgattttatttattcaatattaatattgaatattattttatttattcaatattacaattgaatattattttatttattcaatattaattaatattaattattagtactggagggttttttgtatcattattattctcactcttgtcttactttctctttctctggtctttagcacaggtttggctcttctgattttcacactcagtcttcctgtgggcatagcgtttctactatgctctttctgatcactaatgctccaggtagcaatccacacatgctaatgtcctctgtttaggcttcttctggaccgcacttaactcaatattatttttctttcttgatttgattcacttgcaactcaacagtgtttgtattttgtgtacttttgtaagcctcctacaaatctttctgaaatttcatggggacttacctaccctactagcctgcagcacccagcagcatcccctggcattaatctgctcacttagttcttctgctggtggctagatcctctgcctggggcaggtcggaaaagtgggaaatggcagaagttttttgagaggcgtggccccaggagcactagctctgggttaaagtcctaacataactggtcttgtttctttgtctctggtcttttttctttgtttctcacatgcttttatattgctctgagactgttcatcaaatccactcatcaaaaccttgtggaaaacacagttgtttcaagagtttgctagagcctctgaatcccacaatcccataatgcacatctccaaacaactgatcatttgttgaggacattttagggtattaaaacagtcagtgcagggaggaattctggggcttcaaacctctcgggatctttaaggctatattttatatcctataaatccatctggtcttgggccctaaacacagataatatacttttgccctgttgtttgctgaagaagccatatttcagaataacccaatgggcaataatgattatttcctctattttttttaacttattaactcattttgtcgttgctttataaaagctaagtccagagctagcaattgcttggtgattttggtacagtctgattagataattccggcttaaagtaacctgttcctcaacagcaggtttgttttccccaaccacgcaaatattcattcctttctgacttgatggcaatagacacactttggtgaaagaaagctgtgggagaaactgttccttggaaagcaatagcaggctgcactcttcaccaagcctggcaggctgctgcccactgttctattacaagcacattcatttcagtcggtcagtgcactgtcctttgtaaagtaaagagtataatttcttagatataaaaagaaagcagaaatctaccagcaggaaattgaactgaggcactgggaaatttaagagaaaattgtattatttctttctgttttaatacaatggataaaccaatcatgagaaataacattctcttggggccaagtagggaaaggatagctatgtaaaagtactaagtcagatgatcagtctctagaaatgcttatgatacacagagacagacacacgtcccctggcttatttgcagatgttaattttaggttatttttatgcagtatagctccttttatttcctaaccaatttactcaactctgggaaaagtccctatgtacagtggaacaattattaggataattatagtaaaacatatactaaataaattttctgctaggcagattaaaaataagatccactctgatttgccattgttgcctgtgaattataagtttataaacatgaaagttggatattttgataagtatatatttaatagataatgcacacatatacatgtgtaatgttgcatatatatatatatttacacagacactatcataagcccacaaatctcacatcatgagaaatcagacaaatattacattaaattctaacgtgtccatacctttcttaatgctaaaaaatgtaatttcattgatagtgtagaagtataaagcttagttatcttctttcaaaattctcttctattaaaatgggggctgagaggaaagaagaagccacctacattttgtctctaggagccaagaaaattatgctttagatattgcccacagttttagagataaagtccaactctcaccttaggcataaagtccctcatgatccagcacctgctttttctctagctgctttggcacttgggacccttcaccgtaagtacaccctgatgcagtcttcaaaatctgaaatgctagttcatacccttttcacatgcttttctgaatgggatgtaatcgttttttggatagctaagctgaaattgtaattcaaaattaatcttttctggttttcacaccccttatattttctggtatctctctctcctacaaggagagttgttagagttcaggaacttcatctgcaatgatcttgtgtttcctgacaccgttttggcacataggggaggctctacaagtgtttattgagtaaaagaataaatgagtgattgacaatgaacttcctcatttctcttccgaaagcctttagcagcatctgatgcttcttaacatagttatgtccagggaagaacaacttctagatatttataactcattgtgaatataataaatatgtgattatattgagttagagtcacaggaggcaggactatgagagcactgagaaactgaagaataggaggactaggcaaccaccaatgggggggaatgacagcaaagagaagtctgggaaacaaagacaattttcctatagaagactactttttgctagagtcagccaagcttatgagcatatagttcatatttaaatctaaatattttagaatatatgaagaataaaccagaagaaaatacatttgtttataaatatatcaaacttaaagcagacccactgtgatcataagatttagaatataaaaaacttaccgtttagtaaacagtgccactgttccacattagtggtacttgggtaaaaacacacaatagtcttatacagtgtggcttccaaagccccgagtgtggagaagcccccagtattctatattttgccccaagaaactttatatttctgggaaaactaaaatccaccttccagtattctaagtagaaatgcaaatttcataattttggaaagggaataggtttgattatacactaagaatctgaagaggaagatggttcaaaaagttaaaagtgaaattttatctatatgtttctaaatgatttcaataaaggagaaaagaggaaacttcttaaattaataagcaggtttgcaaaagacccattcaaagaatttctgcattaaaagctcattgggtccataataggataagaggaatcagcccttgattcagtagcgaatatagtatcatagaagcccataggaggagtgctggaagtcaaagttctaaccaactgggggctgcagaaactgaattggacaaccaagaagatagttttgtattttaaactatgaagagtactaaagctctctgaagaacttcaatgaagacggatatcacagaaaaaaaaaagattcctcattggccatttagcttccatcttgtttgtactgaaaaaaactcaaaaggtgaaacagttattagtaagtgggaactgaaatccatgatggattaagaagttgtaagtgactcctgcccctactcactcttctgctgctctccgggagttctggctcctagtttaactgggttgaactcaaagatattgcctgcctgcaagacttcagaaacagcagaactagtaggtctaagagaaatcacagcaaataatagaagactggtgaagggcaaatcactatctagttttcagcaaaataacgtggattttacaagccaaagctctgagtttgatactgattacagcagagactctaaaattattaaagaatgtcctgtaatctcttgtaataaaataacagttacaaagatctagcatggtttgcctgaaaaaagaaaacatgaaaacaagattcatcactttctttgtcacaagttactaacctcacagatcacagaaatttatttggtggtgcttaaattgtatgaaggaatctgacataccttttcactatttggtggacaagatggaaaaaaaaggaatttaggcaaattattaaacgaagtaagctactatacttgaagagtacaaattaatgaataaatatcatactatagggatttcttttcttttcttttcttttttttgaggcagagtctcactctgttgcccaggccagagtgcagtggtgcgatcttggctcaccacaacctccgcctcccaggttcaagcgattctcctgcctcagccttccatgtagctgggactacaagcacatgccaccatgcttggctaatttttgtatttctagtagagacagggtttcattatgttggccaggcttgtctcaaactcctgacctcaagtgatccaccctccttggcttcccaaagtgctgggattacaggcatgagccaccatgcctggccagggaatttctagttgtaatttgagtaaaggctttgtccataaagttactcaaaatatttgtaaaactaacagataacatggaatgaaagaattagaatataaaatttttggtagactatattgatagtctagaatttcaatgataattgtgagatcccattcttggattaaaaaatataagacagttacaaaagggaaaaagtgagacttggtagcatgtgtatgacttagggatttgagctgatagtaaatttaggtggaatcactattgagatgttatggggacaaatgcaaaaatcctactctaatatgcagaaagtgatagtcccacttatttgttcagaccatatctggagtaagacaatactttgtgggttttgcagttctagaagaatttagggtaaatttatgagaaaggcaacaaagatagaactcatcctgatatcttataaggaatagtggatgaaattgggaatatctggtatcaagaacactaatctcgctggtggtggagaaggtgatagttgacctcagtagtgtgaaaggtttttatgtggaaggaaggtagactattctatacagtttcaagggcttgaatgacggcaaattggtggaaactcaaagaagacagattctgacattatcacgaactattttaatggtcagtgatgctcaagtatggacttccttttccttgaagttggggatggacttccagatggtgtggagtgggaattgaaaaataggaatataatgttgcacttgatgagtcaatgtcctttttaagccttgaaattagatgattctgtaatttggggaaaatgttttcatcccagtcttattttttattttaactcagagttttgaaaaataagaaaaaaataagattggaatatatgcctcaccagcaatacaaacatgattttaggaaaggggatctgaagtctcaaagtgttcaggaatattaaaacttttgtcttgcagattattctaaaaatcaccatttgccatttcatatttctagcaatgcatcagaagggacaatttaagtttcatagtctataaatagctttgtctttcatatttttttttacacataatttttgagaatctttgaaatcaaggggaggatgaggcacaactgtagctatttatcccactggaatccctgaaataccctttctaagagggtgcctattgcaggcttgagaaatcaatacttaacctatagaaacaattattttaaaacagcctttcagagggtggatcaagtttgactaagggctaaaagtggtgagacaatggtttcctgcaaaataaattcaataattgttttggctcataatatttttttacactgtgtctgaacaattaatgactttttctggtagtctcttgctgaaatatcaacataactctcaatgcagaacaagaaagcttaaggctgaatccaaaaataatacactatagaaaatagcaaccaaacccacctacctgatagacacaattttacaaaatacacacaacagctgggaaaaaaacataaacatggagccaaaacatggagatttggcttgaaaaataaatggaaattagacatggcttagcaactggatgattacaatagttgactgaactgaactttacactggatggtctggcattgtttaaccatctagaaaaaccatatgtaatatttagcttttcttattttaaaaatttacttatactagcaaataagaaagctatattaaacacattttaatttttatgatattgtatagtgtacacacacactaccgtaaattggacagtgagtaatatttaaattgatgatgatagctataataactttcccactgtcaatagaaaatcaatatgtctttattgaattcagcaaaaataagccaagttaagcaactgaatgcttctaaatttgtaaagtctgcatcaaaattgtctaagcttgtctatggcttctttctgtttggcaaacactgcaaatttagatcccatggcagagatttttgaacactttataattattttaatctccatctgaggatgtcagactgcttctaatttgagaataatacttctgatacattctaagaagttaagtagttattcttccaatagtgctaataagtgtgatcttccctattcactcttttgccccattttctttgaaattagaataatgattccatctttagccgtcagctgatccacatatagtcaacatcacaaaggaacataaatgattgaaaagttaagccaaaatatgttattgaatatatctgacctctgacaagtcaggcttcactatatgccactgtctattggagaatcatgtcatcattgttgcaaaagaatggacaaggtatatactgttttttgtttatagttttgacaaatttcctatttcctctacaactgctttctctctttgcccctccctcttggaagcattttccggaaacaatggtttctgtttgcttgaatcagttgcctcatctcaaatgcctaccttcacccagctacaaaataagcaacactcaaatctctataaatacatttgactgtttctcacgtgcaactcttctttgacttaattgttgactctgtcttgtatgatcaaatgtttatttttttctgggtgaattattacagaatattctaaatctctagatgatcccttttttctatgtgctttgcctcagcaaactcactagtgtgatctgccaaaaatacgtaatgcattacaaagccaattataaataatcttgataaatacgccgttttgaatcactcaggttattctttgctttttaaagtgaatattcaaaagattatgtatttttttttggtttgggttgatggttagaaaagacaaccagaaatgtaatacagttcatctccccgtttctgtttattttcatagtgatttgcaactatactgagaatggaaaataaaacatttgttgcaagaggatgcttatgttcattcttaggaacatggagtgaaattagaaatggagaaataaaaggaagcgaagaaaagatctctgtactagatgtgggtcagcacacttcaaattctgaaggcttactagaaattttcaaaagtttttgtcctcatattttggagttaatttaagattgttaacttcagacgaaagaacatgcattcattatttggcagagcagtatgttcttggtacttagattttcaaatatcttttctcatgtaggacggtcaattccaatggtgaaaattcattactcttgtcattctaatcaacaaaagaaaagcaaaactcaggcagttatatcttcaaactatctggcagacaagtcgacattaactttttatgtcattattttatcaaaaactttagctttacagtttgctacctggaggaaatcttaatatgttggcattcaatacagcacgaatgttgatgattttttgcactctgtgaagaacatttccagcaacactcacagtttaatacccctataggcttcctttccagagatcatatgttgcatttaatgactgattgcagaatagtgcagcaataaggtatatatagtaaaggatatttgagtatgtttcctattatatatttctgactctacaatccaattatttgtttaccttcttttttttccatctgtgttctcagttctgaactccctagcctcatgaatggtatatgttcagtagggcttaataaatatccacagaacatgagaatgattccgtgggcaggttcttgtcagtaggctcacgttgtcaaagtaccatattttaaaaacttgttggattggtgaatgatggttgctaatgccctccagagatcccaggtaatgactattgcagtgcaagacagtgacacatacctagaatttgaatcaggacctctgagttcaacccaattctgctcacattgtaacttggccttttgaggacttacaatgtttgtttgtttgcttttgttcatttatttttgtttttagtgtgtaattttctcaaaaagtagagctaacatctgatctacaacgaagagcaaatggatgttttgagatatgaaacattacacagatatgacactgctgattgatggttacataactccaactgtgccaatattttgaaatttgttgaaagtaagatttttttttaaatgtaaaaggccttatatatttttcttaggtgaaggagatgtggatctgatattttaaaggatttcttattttagaattttggtttctgttgaaagcttcagccgacactggggagagagaaaactccatttctatggaagaagaaaatcccaggagaagatagatgcattttaacttagcagaaatggacctgtaaattaattcatttgtcagagttggggagggggactaactgagggagataatttggaaccagctctcctgccttcagtaaccaggttctgctttgctgatgatttaaatttacacactcactccttctagagcgatgattcttcctctggactggttcagtccccacagactcctacttggagggcagaaagttggtgctgtcacatccaagttttcactctgtgatagtcagtgctctgggagtagaactgatacaggcaactgtcattttctgacaggagagtgacagcgtgagttgtactcacactctcattacgccatttggaaaggcacaatgtctccagagtatgcactcagtggtttattggtcttaatttgatgtttgctgtaatagatatctttgtcattgcattttttttcctttggcttaattttattttatttcctatgaatatgatttaaaaaaaaaacctttgcagatatagagccttgatttgttttacctttgaatgcaacatgtatattcctgcagttcttagactgttcaatcagtgctaccaaatatctgacgtcagctaacacctagcagcactaacacctgagggtcaaaattaaactctcagctggggtctacatacgccagtaaagaaaggcctcaagccccaagttttgactgctgatttgtcttatacttctcttcttcaataaagctattacatttaattttagatgaattaaggaaagagatgctgaagtgaaactacaggaattgttgaaatgtaagtaaatgtttcttcaaggcaagctaatcaactactgcaaatcccttctgatttaaggaaaatataacaaaaacacgaatattagacacattatggatttttactgcagatttcaactttagactatattcctggactcctcactccgtaaaaccattcaataccctcacatatattctcacttcatttactttgctacttttctgttttggcgagttatagtacgtcattatttttacatcatttaagtttatagcatttatataaatacttttcatagttgattgatcttggctctattctttatttacaagtatctttttttcttctggatattcttatcatgtaattcttccaggaaaatttcgttttgttccagaacacttgtctataccagaaggggaattcaggagagtataacattctttttcttgctttcaaaatttataagactgtccactgtttgatatgagatgtgcagaaagagaaatcaaaggatatttatattattccttcctgcatgctcatgtgagatattttccttatctttaaaattaaataacttcactagaatatgtttatgatgattgcaatgttaaaatttttccagaaacaatgggtgcctatctagaatcactattggtttattttaggaaacactttttttttctttatattcttggaattattttttctcctttatttgttgagttctctttttcaggaatactgattaagaaaaaaaatgccaaacgtcttttgccatatttatgtcttttaccacatttatggtaaaacacattattgccattttaccaatgctattaccatatttatggtcatttgaaaatcctcattcttttctattttgttttgtgagatatttcaagcctgtctgtcatgtttctgtggtttttatttctgttaatcctgcgttggttactcaaatgtggctttctttctctcaaatgtttatattactctcatttctttgttaattatattaactcccttccttgtttttttcttatttctcatttgcatgcctttatcattgacatcatccctgcttcttccttcaggaaaccatcttgtctacaatttatttgagaaaataaagttatttgtctaacgtaatttttggtttcctcttggagtacttgttctcatttgctctttgtttatttttctttttccctttaaatttcctggcactatctacacccatgttccatattggatcctttgagattatttttcatttttctatggaattagtagtttgttgaagaattgggtgtggaggggaagcaaagtaggaagtgagtggcaagagactgcagccttgattcagcatgtggcctgaaaaccctctcactcaccctgttacatgctttgtcacaggggaacatcttgtttttgccttccaaaaaggtagggctcagaagtctgtggattcacgggccctttggttgtatgctgtatggtcactacttcctgtttttttcctcagcctcctttgcgccctggatcctcctccccactggccaaatagaaaatggaagacacagaatagaaatgcttcttgaccgggtgcagtggctcacgcctgtaatctcagaactttgggaggtcgagaggggcagatcacctgaggttgggagttcgagaccggcctgactaacagggagaaaccccttctctactaaaatacaaaattagccgggcgcgtggcgcatgcctgtaatcccagctactcgggaggctgaggcaggagaatcgcttgaagccgggaggcggaggttgcagtgagccgagatcacaccattacactccagcttgggcaacaagagagaaactcagtcaaaaaaaaaaaaagaaagaagaaagagaaagaaagaaaaaaataaagaaggaaagaaggaaagaaggaaagagagagagaaagaaagaaagaaagaaagaaagaaagaaagaaagaaagaaagaaagaaagaaatgcttcttcatgcatttgtcccgtcattctgttgagctgttctgagatgcactaaggacatccatattgtttttctgtgatttatcttatatattcctcctttactcaaaacttcatagcaggactttgcagtattatgacacattttgtagaggaaaatctgcactctgcttaaagaatgagaagggagaaggtatgctttttctttttgttatcctgtttgattttggttcagatttgacagtagttggcaaatattctttatagtttttggtttcaagttttaattattttcttgtgtttttttgttcgtttgtttccttcattataaaattttttctccatccagttttcatatgtatatgtatgtatgtgtgtatatgtgtatgcatgtgtattatatatcccatccttattcaaatacacatgtcaagatttcatatatatttgagtaacagtatggcataaaattgtgaacttgaccttgtttaatcgacctcctactctcttctcaacactttattttactggctcttcttctttctgcctttttgatactttatcttctccatttctctgtcctttaatgaaccattttcctcttctttataattttaaggcttgctagaggtataattcttagctctccgctcttttcttcactctcattgtccttttccttcttcttcccatcatttttctattttgccttcctgcctctctcctgccatcttctatttcttttataagttacttctcagcagtttcactgtttctatactttaactattgtggccaggagcagtggctcatgcctgcaatcccagcactttgggaggcccaggcgggtggatcactaagtcaggagttcgagaccatcctggccaacatggtgaaacttccgtctctactaaaaatacaaaaattagctgggcgtggtagtgcgaacctgtcagccaagctacttagcagctgaggcaggagaatcccttgaacctgggaggtggagggtgcagtgagccaagattgggccattgcactccagcaacagggtgagactctgtctcaaaaaacaaacaaacaaacaaaaacacgaaactattttttctctgcataatcttctcacatttctatttctgggctctgcatctttgttgcaatggctggttgtctctttactacatcaagtcaaacatctttgaaacaattatcattgcattctctgtatcctcagctggacttccacttttccattggttgcatcgggatgctggatcatgctttcaagaacacacctaatcattctcaacagtattgctgtgatactgcctaattactttgttttgtttattcaggttgcaacactattgtttctctctttctctctctctctccctctctctctctctcacacacacacatgcacatgtgtatgtgtatacacataaaattcaccattgctttacttagccttaattaactagtagtagcatttatactctctcagttacccagggttaaacgtaagttattattattattattattaaaagtttttttctaacttgatcgtctcagccaattcaagtccaataatcagactttgccttggcaacgactttatctgtacgctgcttctagttgcacttttaccaccctaagacccttaatgccatcaatgtggatatctagagatgctaaattctctttctgtccccgccaatgtacaatgcatgcttctgctaaattagactatctgagctggaatgccaacagtatcactgtctggcattaataatgtccgtgacttcccttcatgcccctaatgaaccagtaatttgtccaagttctccattatgttttccaacctgtgcttccggcctcatggcaaacaattcaattgcctagtgcaattgaatcctccactcacaccttgatgcttattagagtctaaatcatacacaaactatcacttttgtgtctaagctcgtaacattgtttttatccagaaatcctgctttctactatcatgcttgtcaaaatcttattcatccttctcaaatggaaaccttctttgtaaagatttgtggatccctgtggctagatgtattctctctttcttcagttcttaatatcatctacaaggctctatatagcctggcatttgcataccgtttattacatatactacagcttgccttctttgggttccttaaatagaccaagttgtgtgtgtatatatatatatatatatatatatttttttttttttccacgatcttcaccttagctgtttggtatacgtaaaatgtgtttttcctagtccttaggatgacttgattcttcttaaatgtcgtctcttatggaagttcatttattccaccctattcaaatagattttcggaactttctcccatgccaaatgtttctttatcataacactctgtcatttcccaaactgactctgtgaaggcagaacagaacccaaatctgttttgttaaccaaggtctacaaacacacatagtatagttcctggcatataatagttgccaaaatatttattaaatgaataaatgaatgattaagcatattgtttatactttttcttttcatgtcccagactgtattgtacttcctaatatttttcttgtattttattaggttttaaaacctttgaagtaaaaataaaacattttgcattgttcatcttggtatcccttagcttctagtatggtgccaaacattcatgagattaataaatgtttgctgaattaaatcgatttgaattaaaccttcagaacaatattaagttattgccaggacatcacagatggtaagtgcaatttcctctgctaatagcttccaaggttgatgatgagataaaatcagtcgagcatccatcaataggggaaaagctcttaaaaactaaatcctctaagtcattgtagtgttgcctcctttgttatactttgtttcctgcgcccatccttccttagagcgtcagacacagttcttatgtactacttcattaaggataagtgtagagtgatgtcaggaaggaggaaaggccaataaaaggccgtttgtttttagcaatgttcctcttaaccaccaaagacaatgtgtccatgtgcttatccccttctctctgcttaactccttgactccaatttctcagcttacctctaatgagagagtgtgccttaaattcgagatgagtgccggtaagggttcttaaaagctggcacatttcaagtgcatggtgagaaaactaccccaggattctgcaggtgttaattatggtggaagctagcataaagatgcagagtgtagagcggcttgctgctctgatcttcatgccctctggtgccctctggtgcctctaagagagaatgactgaacccaacagtggatggcccctgttactggagatactctctctcaccctctcatatgtgtgtggagtgagagaacaaacagcccccatgaaactcacgttttttagagtgcagaaatctgtgcaaatcttaaaatagcatatgcccgtgaagtttatgtcatccctttttggttcggtttcgctgactttcagaaggatcatgatatcttccttactgcattaacatttgctgacagaagatccttaaaaactatctcaaatatttgttatctctttttcataaacaaaatcatcttctctttgccataaatggaacatttatgtagatcctgggtagcatttcttaaatctcacagatatgaacataattcagcagatgtaaatttttttttgttaggactacaaattaagcagtttgaagggtatttaaaaaatctctatcttttcgatgtgtggctctgggtgttatccatttctaaggtgttcaagattaaagataatactgctatcgccctaatgttctaactgcatacacaccctgtacccaatctcagatatcctctcccctggccactcctattcaaagcaacaaggacaaccaccaccacaacaatgaacaaaaaacgaatcccaggaatggataaggtggtcgcagatgccacaggttattgatggaagtaattttggagtccttgtttagtgctcataacatcttgtattcttggcctccatctggactctgccagttccttagtcttagcaatgtaccaggcacataaattctctttattaagaaccaaaactacttttttcattttatgtaaactcataagtcacatcttcagctcattttgaagtaagaatcttcagtataacaggggaaatagtataactactacaaggtaactaacaagtaacaatgtttgtataaaagccagagagtatctcagcaggaaatttaatattttagaagaacagacttttagagcaaacttttacttacgatattaacacaaatgaattcaagatgccaataatattattcctaccttttattactgtcagtctgtacaaactcttagcttatttgctttacagatcagtctgtgaaaatgaatcaactagaaatgatttctttttttttttttcttgagatggagtctctctctgttgcccagactggagtacaatggtaagatcttggctcactgcaacctccgcctcccaggtccaatcaattctcctgcctcagcctcttgagtagctggaactacaagcgtgagccaccacaccaagctaacttttgtatttttggtagagtcagggtttcaccacgttggccaggctggtctcgaactcctgacctcaagtgatccgcccacctcggcctcccaaagtgctggaattacaggcatgagccacatcccccggcctagaaatgatttttttgagacaagagagtagcaatctttgagcaacacagattgtttacaaaggcaataatagacaaaagggagatataaatcaataaatgtgaacaacatcctcttcccataacatggcatcttctaggatctcactttcagtctgttctttacctttgctcccttttctagccctataatgcagtggaaatgccagagtctgaatgactttagcttgagtcctggttctgactcctaccagctgtgtgatcacagttcctcttctgcaaaacagaatctaataactaacttcatgagctatgaggagattcatgtacagcacctattccagagccagggctactagtctacctcatggcctcaactctcttagctacttaaacatttccaagaagagcgtctttagcactgacttctcttctgaactggtgatctctaattgcaacataaatcttgatgtcaccccttggacgaaatgtcctgtcttcaatacatgttgtttagaatcaaacatattatctgtttccccaaatctgcactgactcctggtatactggtttctcttaaagacactaccattccgttcacttacttagatgtgacatatcagtgccatctttgatccttctccctgatttcttacctctatggaaaaattttcaagtctgactatttctccttccacagtttctcacatttcttcccacccctccattcccattgtcagcactaagttcacagttgtctctgatgtcagcctcagctcacatctcttttgttcttgaaggattttccttaatgctgctttgtcacttctttcttccttctaccttgatgcttgacattcaaattatttaggaatctgaccctacttaaatagttagttctctcccacagagcacttttcactttccttgcgcttaaatgcaaatagtgactgttactattcacatctgagtaacttgggcacctctacccactgttcctcctaccaagaaggccccctacctgtagaaattctatacatttcccaaaattcagactaaaatctatgtactctgcagacttccttcatcctgcaacttccagctaaacttcaatggccccttatcagttccacttcctacctccattctctgtacatcttgtctctcttactagactggaagatactcgagtgcactactgatattttcttcctagtgggcacattgtaggcagtaaataaatgtggcctgaaagctgaagcaaatgaaggaacagccacataaatatgcaagtcatttaggaaactttacatttatcaaaatgtttttcaagtggtgaatgctttacacaaagtaaagtgttatgttatttcattatgatataggagaatattttcttatgtcagtttgaggaataattttttccatcttggcacttgtgtcaaattactacatttcaaagttagatttgaaattgcagtagggatatatttttattttagtgcttctttaagttataaagcttccctgataaatataccaaatttatcaataaactatgtagagtgtctagataaaaaccttttggtaatgtaattcattctgatcttatatcccaaagctttaagatttgcataaaatcaacatatcttctcactcttaaagtactattttgtgtcattctaaaagtagtgaaaatattcttttatataaaaggaattgtagcctcactgaacaatttaagtaaaccacttttcttcattctctactggcaaaatattttatgttatctttaacactctcacaattccaagaaagtaactatgacatttgtgccataatgaagcttcctctcaagtaagtaaaggctcaatacttgaaagaaaagtcttaacatttacatagcagtacaggggttctcaacctcagcactattgacattttggttctgattttttgttgttgttgactgttccgtacatcgtaggatatgtggcagcacccttggccaagaatgacttctgatgtgactaagaactaagtgacttagtcctccagctaccttttgaattcaaaagtcaattctgaaagtctgtttattaggaagccaagtatctcttagtactcagatatctcttgggggcaaaattgcctccagtggagaatcatttcagtagtaaaagtatttactaattctacttactgtgtttttataaattaatctccccaatctagctttttggagaaaaataggccaactatgctttcctctagtcaactgcatatgactcatgggaatgtctgatttcctccatttattagcatattgatagcaaactcttcaggagcattcaccaaatcaacgtgtattaaatatccattctgcattgggaaaatagatgaaagaaacacagaccaaaacccctgctttcctgaagtttacatactagtggaagaagcaagacaataaacaaacatataaaggaaacatatagcatgtcagagggagataagtttaaggcaaaaattagaagaacagtaaaaagaataggtgatgctgtgtaagcagcatgggtgggtcacaattttaaataggatggccagggttgtcctcactgcccccatgacatctgagcaaaggcctgaaggaagtcagtagtgagcggcctagtccatctgtgttgctatacaggaatacctaatgctgagtaatttatataagtttatttagctcacggttctgcaggctgtacaagaagcatgatgccttctggtgagggtctcagggagcttccacttgtggtagaaggggaaggggagctgcatcacatggcaagagaggaggaaagagagagagagaagcgagtggggctgcgctgttttaaataaccagctctcacataaactaatagagcaagaatgtactctttgctttggtgatagcaccaagctattcatgagatatttgttcccatgacccaaacacccccccaccaagccccacctccaacatttgggatcagacttcaacatgagatttggaggggacaaatatccaaatgatatcagggagtgagctttcaaacacttggcagatgagctttccaggtagagggaagagaggccttgaagaaatagcctgccaaaaataatgagaaaaaaaaacaagaaattactatgcctggaatggacttgggtgggggaatgaggtagacaaaattcccagagaatggaggcacacatgaagatcatataagcccctttggtcattataaacagtgaataaatgactgtcaggaaatatcatatataaaatagtggaaatgatgttttctcatctatttgctttagttgcactcaggaactaggatcatgatggttcaaggatccggggagtgatgtcattcgtttgtcttccccagcaaggcccaggcttctgatcatttctttcactcttccttgatcaaagttaaacagtcaaggggtcatcatttgagatttttctaagaaactagctggctgaactgatgtaatgcatgtgaagttgcgaatggtttagtaatgcttcatccagggatatttgcatcatagaaaaaggcctcttaaaaatggacttttagaattgacttttgaattcaaaaagtaaatcattagctggagaactaagtcacttttgcaaaccagggcatgagctgttgagggcactttgggccttttcaagacctgaacttgggctctagatctgacatcatagacagtcatcttgtagtctcaaactatcaaactagtatgtattggaaccctgtgagatatcactcattgtccttagggctagggaagcagtggtgaaaaagctaattcctagcccattgagatattttattacggagtgaaagagacacaaattaaagtagtaaaataaaaaagaataatattggttacatataaagtctatagagacaattaaaatacaggaagtactacacagtctgtctgcaacttcagatggccagccaaaaataccatctttaaagagtgatatttaagctgagatctgaatgtcaagaaggagcatgaggaagagatttccagcagaggaaataactagaccaaaggcagcatataacttgacataagaaataagcccagcatcttagaccaagtacagtatattgccagtgaagtaggcagaagccaggtgggccttgtagctcatgataaggtatttgaattttatttgtatgtaatgagcagccaaaggagggttttaagcagattagtgggatgttctagtttgtgttcttagaagattagggataggggttgagaatagatcagctggggaaagaggcataggaaagacttgaaacccaagacaagtaagaaggttatgaaaccaaataaacaacccagatgagaggatggtgatggtgaaggtgaaaaaattaactgattggtgatgtttttggagacacgatcggtaggattttctgacagatgaaatgggagagatttttttttcaagaagaatcaagagcagctatctcctaaagttttggcttgaacaactgggtggtttgaggaatgtttggtaaaggatggaagactggaattggggggaaacacatttggagagaaaagcaagagcttaatcttggaaatattgtttcagattcatacgtaaacatcagtgtagagattccaagctggtccttgaatatatgtctagatttctggggtacaagtagtgttggagctagttgtggattgaaagtcagcccagtggtgggtgtttagtatcatggggctgggagagtcattcagagagactctatagcgggagataagcagaggaccccaggcccctggtctggccccagagactgtgtggaggaagatgaaccagcagaggagaatgagaagttctggtagtgatttaggtggaaaattatcagcatacagcaccagagcagccaaaagaatgaagtagccaattatgttgaaaactttgaggagtcaagagaaatacagagaaatggcatgtgacatgatcacatgataattacaaagtctctcaaatgactgcaatgccccttgtgtgttgtgaacacacaatgaatacctgtgaaataaaaagccacacacaaaatcaggctgatcccagtgctgcatttttgctgaactgaaaatcgttcacacatctattctgaaatatttgcttagccccacctaagtaccagacactgtctaagcaccgatgatatagaaggagaaaatacagatacagttcttgctcttctggggcttacattgcagtgaataaagttagacaatcatcaaaaggcttatcaataatttattttcagatgatgataaatgctatgatgaaaatgatgtagagtgataggatgcagagtgcctgagagaggcaggtagcttacagaaatctcagcacaaagaacaggaggatggagacgtggcagacataaacactgagagagcagtattttaggcaccacaaagtcgaagcctaaggaccccgaggttggaataaatttgttatatttgaggaactgccaggagctctgcattgatgggatgaggactaagagggagattattatgagatgaggtaagagagctaaggtgggggacagatgatgcaaatccacaggaaggattttagatttcatcattcaaagtaaaattgaaagttattggaggggtttaatccaaggggttatatggatataactttgtttcagtttcaaatgtaaaacactagtgcaggtgtagataatgagtgagcatcaaagtaacgtggaagcagagaggtcaatgcgaaagctatcatggtagcccaggcaagaaaaaatagtggcatgaaatagtgcgatagaaatgagcaaagcggtaagtggcagagctgggatgcccacaatggacctgtctgacttcaaatttgtgttctttcccatgatttcacactgccttccaagcctggcaatcccttgcagtctggcgagaatgcaggagtcagttacatagctacacgccaagtaactaagaaatgtttcttacaacaatgcataaatgtgacaaacttggcatttgtataaggagtttatgttagatctgtctgggaaataacaatgaaaacagtgagttaaaacacaatagaaacaacttaaagcctttggcaggcatttttgagaattttttgttagacattggctatttccagaagacttctacccaacaataaataattttcattgttatgaaaagggtaaccctttacatggaaaacttaacaaacaactaatgttaatattaaaaggataataagctgcttcatttctaaattaacaactaaataataatcctctgattatatatttacattgtttttctttggatctaacttggccattactggatttaagatttgagttatcatgtcaagactttaaccaccttcagctcgaacatcaaaccactaaatttcatcaccccctagtctcctgtgaaggcagtaatttttccatttttatttatttattcaagacagaatcttgctctgttgcccagtctggagtgcggtgtcacgatcttggctcactgcagcatccgcctcccaggctcaagcaattctcttgcctcagccccgccgagtagctgggattacaggcaagtgctatcacgcctggctaaatcttgtgtttttagtagagaagggtttcactatgttggccagctggtctcgaactcccggccccaagtgatctgcccacttcggtctcccagagtgctgggattacaggcatgagccactgtgcctggcctatttttcaatttttagagaaaataaaggtaatagaataacaattcctctgctctctctgagaaggtgacaatgaagaatgaccctctctccactcagagaaggctggattcttcaatagtgacgtttgcccatgaaacccagtgcatgttgtccttctgcctcatctcttctgcagtaccaggtcctatgtcaggggctcccagtgtctccctggaacctcttaatgacagcaattatcagtcacctctgtcagctctccttcctttaggaagtgactccccggcggctgttcctatggggacccaggtatttcttatttcctctcagtgctagaaaaatacccaggtctcccagttgcagctggactactctgttgtgaaatatcagggcagttcacagcattgccttttacaacaattgcatgaaagtcttcagaggagtttgtttcgggagctaaggggctgcacaagagaagcagctagctcatgataccactcctgccaagccatgcctgtagctctgctcagtgacagagtctggcttttcattggtgcaaaatctcattctccttgaagaagatttacttcatagaaaagcccttcactccaccctggcagtctcagaagtcatatactcaaggggccaaacacacaacttctttgcacacctccccacaggatcaaaggatcctagccacagctttggcagttctgaagtttctcaggaaagtgatacaacataaattctacattttttttgtagaatttatgttgtatcactttcctgagaaacttcagaactcacatatacaccatcgaatactatgcagccataaaaaatgatgagttcatgtcctttgtagggacatggatgaagctggaaaccatcattctcagcaaactatcgcaaggacgaaaaaccaaacaccgcatgttctcactcataggtgggaattgaacaatgagaacacttggacacaggaaggggaacatcacacaccggggcctgttgtggggtggggggaggagggagggatagcattagaagatatacctaatgtaaatgacgaattaatggatgcagcacaccaacatggcacatgtatatatatgtaactaacctgcacgttgtgcacatgtaccctagaacttaaagtataataaaaaagtatatatatataaaataaaatgaaataaaaaaacaaaaaaaaataaattgtaagaaggctcaagaatcattattgataggaataatgtattttaaattactgacagttccactgccctctcttctagcctcacagaatgatagtcaacagctaagaaatttccaagaagtacttgaatgtagggggcactcccgtctcctcacactgggaaggtaagactgcaaggcttctttcaagtccagcagtaatgcacttggccagttgacatcaaaggtgggtcctgaggctgaaaaggatgattttgatttatcagcactgggtggggacgctaacctgggctcccgattcttctctgataagcaccacattattatcttgctaggcctgagaatgctctttcatgttttggaatttgtagtcagacaaatgaagtttgaattctgcctctgctcttttctatctgggagagcccaggcaggtattgtaacttttgagtagcttagttctatcttatgtaatgtggaaataatgatacgtaactcatggtttataggcagaagtaaatgagaaaccatctatagtactcaggactcatcttggcacactgtgtttattcaataaataccagtgattattatatattgctcttcatttacaaaggaagaaagtgcagggcataaagggacctcacttgatgtttcataaagacacatcatggaggaaagaataagaatcaaagacttttaactttcactctaggccagggtttgttaagagaccaatagcatacgagtaagatgcctggtgtctaactgatcctcttggggactccagagaaaataagaggctatctactctaagccttttgactgctggaaacctcctagctgcagcttgtgagccctgggcagagttacagcctgctgctgttactgccaacctgggggagtgacagcataattggatgcctctctgtcttttggctcaagacaagggcaaggaagaatgcccacctgcagggaggaagtagagtccagaagacagaaattttgacaaatagggaactcatctgcctctctcaccagctctgtcctcatcttagatctgcaagccctcacctgagctcccttcctgaatgacttgaaccacagggacaaattatgtccacaaatgggtcaaagataactatgtgccacaccaggagggtatgtaggatttgtgacctttggattgcaattatttgttgacaacgcctttggcaatgtggttgctttaaatgcaaagcatgtagctgagacatgagtgtaatttggaggagagttagataattattgcatcgtttaaatatttatatatttaaaaaaatttaaattgtagagtgaaagaagcagtgcaaaagaacatctagatccatagttttcaatacagtagccactagcctcatgtggcttttgaacatttgaaagagccagtggctggtccagattgagtatgatataaataggagatatgaatattgaagagagtataaacatagaaaaacattaattttaactatcacatattggaaatgataatattttggatatatggagttaacagaatatattataaaattcatttcatctggtttttttttttaacttctttcaaagtggctactagaaaattttaaattacgtatgtgactcacttttgtggtagagtcattgaaattttttgcaaagacaatcatgtcatctggaaataagagatagttttatgtcttccaatctcccggttgtctatttcttttatttgcctattgcagtggcaagaactttcagcctcatgttgaatgatagaaatgagaaagaatgtctttcttcgttcccaatcttatggggaaatcactcagtctttcatcattaagatgataactgtagctttttgtacttactctttttttttcttttggagacagggtctcactctgtcacccaggttggagtgcagcagtgcagtctcagctcactgcaactctgctacctgggctcaagtgattctcctatctcagcctcctgagtagttgggactacaggcacatgccactaagcctggctgatttttgtattttttttgtagagacagggttttgtcatattgcccaggctggtctcaaactcccggactcaagcgatctgccctcttcggcctcccaaagtgtgggattataggtgtgagccaacacgcccggctgcacttactcttaatcaaactcattcccttcttttcctaacttgctgagaatctttctaatgaatgaatattgggttttgccaaatgtattttctgcataaatgtatttgattatatgcatttttcttgttttgcctgttgatatggtggattgcattaatttctttgtaaatcttgaaccagccttaaatacctagaataagtccatttaattatgttgtataattctttttaatatgttattggattcagcttgctaatattttgttggggatttttgcatcaaaatctttgagagatattgttttgtagtccttgttatgttttcaatttttaattttgtattgtctttgtctaggtaatattgcccttataattattacttatatttaatttatgttttttagagatagagtcttgcccaggctgtggtgcaatggcatgatcatggctcactgaaaccttgatctcctgtactcaagtgattctcccacctcagcctccccagtagctgggactacaggtgtgcaccaccaggcctggctaattgtcttatttttttgtggcaatagggtctccctatgttgcctagtctggtctcaaactcctggcctcaagcaaccctcttgccttgacctttcaaattactggtattacaggcatgaatcatcacacctggccacttatttttatatgaaaatattttcttcatcttttttcctccaccaaattcttgttgtaggctattttgtacctcacattttataatcaaatatgttatttttaattgtggactttttaaagaaattaaatttaaaaactttctatcagtgtatattgtctaatttattgtttgtcattcaacagtaaaacaggattattagctctccatgacccagcctagtttgaagatcaaaatccagggtatctacagatccgctccagctccccaaagtcatccatcatgaggtgtgggtgcaatggctcatcctcctataaccttcctcatttatcatgacatcttggactccaaatcatcgctttgtgcaggtgtaacttatgttctttggtttactgtaggaaacaaaaaaacactacaggagaggaagcaatagcaaacattcagtgaaactaagtcatatgcttttaatgaaccccttgtttgtaaagacagatcagtcaaatgccccctaggcagactatttatatttatgttaccactatccagggtctggaattgaagatttatgtgctatgctaaacacagaacaaaactaattacccagcaggtgaaatttttatgacaacaaagacctcaatatttggtctgctggcagtattccaatactgatggacaactgtataaagatttataaagattctgatttctctgagtttaatggattaactcttgacagtacctgtgtatttatctctgtgtatctatgtgtgtatatgtgtctgtgaatccatgtactcaaatattctacaaatactggaccataaaattattttgatgttgtttttgaaaatcatattctgatacttcaataactgaacagtatatgtgtgatttccacacataaatttgataagcttctattggagagcttttataaaaatacagattcttgatatccgttgctagaaattctgattcagtaagtcaggggtggaggtccaaaaaccatatatcacgtgtgtcaacagcaccccaaaactttttatgtgtggttgcccagaattgctttgatttttaaatcagtttgtactctatagagttaataaacaaaactacaagctcactgtacaaaaaaagagaggttttctattttacctttcagattactagattcccaaaccccagctcatctgcttttaactcttttagctattaatatttcatttggcatttagacactttaaaaaattatgttcacactagttgtcctggttttcttcttcttttgacattgtctattatgcaaaaggagaatttagctcacttagaaaccacggacctgctttttcttgtactcctgtcattcttccaatgttgttttatcacaatttttaaaagatcagccatgagtattttcatgattacaactctttaaatatggttcacggtggaggaatgtaataaactattttatgtttttgcgcagccctgtgttttttaaggcaggtaatacttttactcatttgtttagtttggtacagatagctatcacacattcttccccttcagtcacctacagaattacatacttcttctcaataaggccaagcacattaaataatttattagttcggttttttcccttggagtcctcatgtttacatcccttcatcctcctgttccaataggaattcgttgttgtctaggtctgccatatcgtgaaacctccctttaatcattattttggagattctctggccactctctgttatttggatcctccctcattccagtgaagtatatttaacagatttttttttttttccaagacaagatgccttggaggtatattgtgaagactgtgtttgtgatcaggtcttaattttgccttcatgcttgattgataaccaggcttattagaaatgtttagttaaatatcattttctgtcaaaatttcaaagacataatttcattattttttacttttcttggccacaaaaagtctgatgttattctgctttacaagcattacatgcagggaattcctctctctctgtctcattctcttaaaaaatttcttctaccctactttctctgaattttgacctcttaaatcaatactcaaatcttacctttaaagttccattttctatgtattttccgttttatttgaatttgtgagagaattctcaattttaccttttaaacccttctattaagttttatttcaaacatcataatttaataaccaacaggtctttcttattctcttattttaaaaagaatgtgttattatttgatggatgttctatctaatctcatctccctgaagatattataatagtgtagtttgaactttttttctgcttcttatattgccttaattttatttttttccttctctttgttcattatgcactttgtctttaatgtgaaatttctgtaagtgcctgttcatcgtttgttgtccatcagttcttaagtatgtggaactagaagctctgtcagcctgtgtgggacctgacggactttaccatacaggaagctctactcaacccaaggagattttgcccacacaggaaatctggtagtgtctaaagccattattgatggtcacgattgggttggggttgctactggtatttaagggacagaggccaagtaatgctgctaagcatcctacaacattcagaacagtcccacaatgaagcattatccagctctgaatatcactgatgccactcttgataaaccctaaggtagagtgatcaggaagtaagttccctgctgcattcttccacaggttactgtatacaggacttttttcccttgtgtctatttttacaaagcagaattttctgaactcctgcctacagtaggtgagtcaaataatattttagacataatgttatagtagcaccatgattcaaaaagcatgtttattgtcaattcaaaattttatgtactataatttatttcagacataactgtgattatttacggtacatttctcacatcccactccaaataaaaacaacttttctgggcctctattcatttagcattctatatttcctaaaaatgttcataaatacattaaatctgaccttttaaaaatgaaaacacttttataccatttactagaataaatacgtaaaattctgggcttcaacttgagaagtaataatcagctctgctagttctatcacagtaaacacaatgaaatgtgtaaacacaatgaaatgtgtaaacacaatgaagacaagcagatttcagcaagggcactaattttgcaaacactgggaacctcaaacatcacttaaaggaggatatgattgcataaattatggggcatatatgtgagaaaatgccattcattcattaacaatagaagtttttgaattaatgacataagaaatgtgtgtcccaatattaagtgaaagatgcatagtaactttgaaacaaatcttggaaatatttttcaaaataaaatatgcgtatattctttgaccaagtcattccagttttcacaaatctatagtgtggcatgacccccaaatgtgcaaatatgtttgtataaagatcttcaccatcgtttgtgacgatggcaaaagccacagccctaatgtgtcttggtaggcttgttagataaagcacagaaaccagggtacttgcatgcaatgccctggacagtggtcatttagaagaacaaggatgactgacatctgctaagaagggagcacattccatgtttatcatcagtaccaaaagagtttttactttttttttttcttttaagatagggtctccttctgttgcccaagctgaaattcagtggcacaatcacttttcactataacctcaacctcccaggttcaatcaatctcccatctcagcctctggagtagctgggactaggcaaacacagtaggtggtataggtacacaccaccaagcccagctaacttttgtaattttttgtagagacagggtcttgaactcctaagctaaagtgatctgcacctgcctcagcctcccaaagtgctgagattacaggtatgagccactaagccagaatttttacatgtttaattgtttttaattgctttcattttttttttaaaggaagcacatgaaactgcacctgctattacctctgggatgtggaatggaagttagaaacaaaatttctacttttcaatttagcccattagttactgtttgacattttcacaatgagcattatttttattattaacaataaatcacagtctggaaacttggccatggtagtggtgggtaaagatgggggacttttggatctaaaattgggaagtgaaaacaaaagaagtggggatgacacttctgatgaactgagcaagtacaaaataatgaagacgtcaaagattacggcatgtcattaaaaagcatgttgaaataacagtatggcacacaaaattcaaatgatgttttgaagtgttattcttgcaaaagaaaacaaattttgagctttgtattcaaaattggttctgacatttcttgtcacaaaaactctaggtatatatagagtagagaaaaacaaatttcatcaaacaaagtacacttgaatatctacgtggccttttgagtcctgcactcagtttggctctttcaaatgtctaattcattcagcatgtgagcctcacatatttgtttgaacccagtggatggtcaatagatttgtattctgtcctttatgtcatcattaataaattacatacaaaacatttgggaacaaaaagtctaatgacatttttagtatacgctcaataaccttttggaaaacactccatgtctcttgtttctgggtgcaggtagtgacttttaaatctgttagaatttagaagcattgaagaccacttagcttgcctcttagtgtggagctgctttagtgaattagaataaaagatccttagagacaacagctataaagctgtttcacaatgaaagcaaaagaagcgatacgacagatgaataaagaaaacataaactaagcttaaaaaatagaacaaagtgaagaaaaataaagaaaggagaagatgaagaggaccaggcagaaaagggataggagggctgaagagaggaggaagggacagaaactcctagtgtgtacctaagttacccctagaaaagtgaatctgtagcttcattattccatcaccacgacttcagaaaaagctacgaagggccaggcacggtggctcatgcctgtaatcccagcactttgggagactgaggcagttgaatcacctgagggcgggagttcaagaccagcctaaccaacatggagaaaccccatctctactaaaaatacagaattagccaggcatggtggcgcatgcctataatcccaggtacttgggaagctgaggcaggagaatctcttgaacccgagaagcagaggttgcagtgagcctagatcatgccactgcgctccagcctgggcaataagagtgaaactatgtcgaaagaagaaagaaagaaagaaagaatgaaagaaagaaagaaagaaagaaggaaggaaagagagaaagagagagaaagagagaaagagagagaaagagagagagagagagaaagaaagagagagaaagagagaaagagagagaaagagagagagaaagagagagaaaatgagagagaaaaagagagaaaaagaggagagaaggagagaaagaaagaaagaaaagacagaaagaaaggaaggaaggaaggaaggaagggaaggagaaagaaagagctaggaagtaggtgatgacgggagagaaagtaagtttcaaaaaagaaggtatgggaaaaggcatctgaaaagatctgtgaaaacaacaaaactggaagaaaagacaccaaagcattgtatagcttccagaatttttccccagtgaacatcgatgttttcctttaaggtgatttctgaggaatgttgctgaccacacagatgatgacaactgtataccaggctctcttgtctgagacatatttactttttgttttgctgtattttaaataagtttttatgcacttaccttagaaactgtcatttaaaaacaaacaaacctctgtcttttcaggccccattttgagtagaatcctgttagaagcctgttacaaagcggtataatgtggatggatctgtgatgcattctttttcccatacccttcttcttgaaaccttttttctctcccttcatcacctacttcctggcttttttagaaatcctgatgatacaataatgaagctgtaggatcacttttctaggggtaatttaggtacacactaggagtttctgtcccttcctcctctcttcagccctcctatctctttcctgcctggtcctcctcatcttcgcctgtctttcttttttcttcactttgttctattttttaagcttagtttctgtttcctttattcacctgtaatgcattgcttcttttgctatcattgtcaggaaacagctttgaaaaggtttcaagaaggaagatatgggaaaaggaatgcaccacagatccgtccacattacacctgctttctaataggattccaacaatattctactcaaaatgaggcctgaaaaaacagaggtttgttgtttgtttttaaatgatggtttccatggtaagtccataaaatcaaatttaaaatacagtgaaatgaaaagtaaatatgtcttaaacaagacagcctggcatacagttttcatcacctgtgtgggcagcaagatcccccagaaatcacctttcaagggaaaacattgacgttcacttggggaaaattctggaagctataagatgctttggtatcttttcttccagttttgttgttttcacagaccttttccgactcctgagtccactaaagtttctctacaaataaatatttttactggtctttatttttctttatatccatttttatggagcatatatttctaccctggtacttgccaaggcagtcctggagggccattaaattatgcaaccgggacctaaatacataccaggttaagcctagtgagaaatgccatccaatatttctgatctcatttctcccctttattcatttactctttctttcaacaaaactgaagctctgctaagtggtatggaagaaaagagtttgctctggaataatgaaataggaaagcattgatattgattgtggtggtgggaagaactgagatacagtgtgtggataagttcttactaccggcatgatatttaagctgaaaattaaaacagagtcttttattccataggaactaggagttacttgagaaagttttgagtctggtagtaaattgggaagcagtgtgtatcctagcgtatagcactcttaagtgtaaacccctgcccatgttaaaagcagaatagagttctatatggacatataaaatacatgtacatctttttctgctaataaaaataactcatatccattgtaggaaaacataaacaaacattaaaaaatctatattcaaaccctccacagctagtaaccactaacttaattacactgtattttctcacaatctattttcaaggcatatttccccccataactgagtataatttatatatttttatgtaatatagtgtaaactgcacttttgcagatcctttaaaactaggactgtcaggttgagcaaataaacatacagaacatccggatccatttcaatttcagataaataatgaataattgtttagtttatgccctatgttcctcataatatttgggacatgcttatactaaaaagttactcattgtttatctgaaattcaaatgcaattgagcattgtgtattttacctagcaaccctgttttaaacacataatagtgtattaaatttcttcatatattagattacatttatatatcatgttgtgtacatatccattccctctgttagaaatacacatttctgtttttttaattgagataagtattgcaacattttatatgattttcccaagagaaatgactaaaaatgaaatgattaggcccaacagcaggaacaagattttcaatttgcgatatcaattgccagtttatattgcctttatctttcctttgttagcattatacttactttgtacaaatctagccagtttagaagatgaacaatagaacacttattttacactaaataaaatgttttacattttaataattttattaaattattataaataatacatataacatattttattaaatacattacatttaataactttatgttaaaatacgccatttcattgtatacattttaaagcaatcagcaaatttctgtttcacaactcagacctattgcatcttctctgatctgtaagtttccatttgatagaccatcgtttgtctattcagagcttcttcatacttcacttagctttttcctaaatccagtctagttttctgtcaacctccacagtagaaccagaattatatttataatataaatctgatcatattcatctattctttaaatgcttctttgacctgcctccttccaccccactaacaatgggctcacggttaaatgcctttgagacgtaaacttttgggtacctggctgatctagtttaccggcttacctcctgcccttcacctatcacatttcagtcacatgaactgacttgcagctctcaagttctggccgtgtcacagatcaaggtgccttgcaaatgcttctgactctgcctgaaagcacttctacctccggtctgtccttcagggctgggcaggattgctgctttgctgcaatccctcttctgctctccctggataaggctggccccacatgtccacctgacttgcattctttctcttctgtaactagacacaagcttccagagggcagggattgcatcctagtccttcggtttcatggtctagtaaaatgcctggagcatgataggtggccaatttacaaaaacaacaataataaaaccagcatttatagaacacttaaaattgtgaagcatcctgcaaagccccctttatctgtattaattcacttcattcttacacaaacccaacgaattaggtatcatattctccacttactttatatgtgatgaaactgagtctaagagagattaaacaacttgtttaagtagctatttatgtacagtttagaaatggaaaagctagaatctgactgagttcgacctaaaattttcactatgtaagtggaccgggaacagaaagatctggtctctaccacgaaggagctttcagtgaaaatcaggaagagacataaatatggatatgtatctggtgatttaaggcaatgtatgctgttgtaaaggagggaaaaaaagaaaggaccctggactcaaagttttgaatcgtaagtccttgtgttttctcaagacctgcacactggaagaaataaggaaaagtgactactaccaaaagccaatctttttaatttttttttttttttttttttgagacagggtcttgctcagtcactcaggctggggtgcagtgacacgatctcagctcactgcagcctcaacctcccaggctcaagctatcctcccacttcaacctcccaagtagctgggacaacaggcatgctccagcatgcctggctaatttttgtatgttttgtagagagtgggtttcgccttgttgcccaggctggtcttgaactcctgagctcaagcaatccatccaccccagcctcccaaagtgctgggattacaggcatgagccaccatgccaaccaagggccaatatgtttaaaatgacaaataaaaactgtaaatattaatggtgtacgacatgatgttttgctatatgtatacattgtggattgtctaaatcaagctaattaaaatatgcacgctctcacttctttttttttttttttttttgagacggagtctcgctctgtcgcccaggctggagtgcagtggtgcgatcttggctcactgcaagctccgcttcctgggttcacgccattctcctgcctcagcctcccgagtagctgggactacaggagcccgccatgacgccagctaattttttgtgttttttagtagagacggggtttcatcatgttagccaggatggtctcgatctcctgaccttgtgatccgcccgcctctgcctcctgctctgacttcttaacacgcaaattatacagcatctcttttgtatgtggatataactcaaagtcgcctcagcctggtgccacagaaacactgaggaagaataaaccctgtattagtctgttctcacactgctgataaagatatacttaaaactgagtaatttttaagaaaaaagaggtttgatggactcacagttccacgtagctggggaggcctcacaatcatgatggaatgtgaaaggcacggtcttatatggtggcaggcaaaagagaagcttgtgcagggaaactcccctttataaaaccatcagatctcatgagacttactcattatcatgagaacagcatgggaagacccacccccatcactcaattaccccccactgggtcccttccatgacacatggtgattacaggagctacaatttgagatttgggtggggatgcagccaaaccatatcaaacccaatatatttgtggccagttaggaaaggcttcagagaggagatggaaggtaccaataagattgagacgaaagtggacagcttctgaggatgagaaatgaggttagagctaaagtatgtttagggacttgtaactaactatttacataaattgaaagtcattgaggagagaatttggaagtacaggaaaaaaggaattaaagaatctttgaggtaaaaagagccttagaaatctcatagtttgtttcctgaaatggactatttggaaacccaggtttgtggagatattaaaaggcatctcatgatgtacatttcctataatgaagtcgtttaattagtttaaatagcattccaaaagcttttgcacatcaggacttctcagggattttaatatgttaaaatctcctggaaccccacataaaagtaattgggcatttctgtgtttaagagttcagagccctcagtctggcataccagggctcagatctctgctttgacacttaacaggggtgtaaacttggatatatttcttacctttccgaagtcttggttggttttcttatctgtaaatcaaccacatagagctgtgagggttaaatattataatgtgtgtagtgctcttggtttccggcacaaagaaaattcctaacaaatgttagctcttttatgattatattgttcttcatttctaatatgattggtcacaaggaccttttttattatgaagcatctagcaggacagtgtttctcaggatatacactggaaaatattgatctagtttattgcctttgagaaatgttgggtcctgttttgaagggccttgaatgtcagaacaagtttagattttatcctgtaaaaaattggaaagtttccaactgaccatattaaaatctgcgttttaggacagtggtctcccgcctttttggcaccagggactagtttcgtggaagacaatttttccacggatggcagaggcttgtttcgggatgaaactgttccacctcagaccatcaggcattattaattagattctcgtgaggggcgcacaacccagatccctcacatgtccaattcacaatagggttccctctcctatgagaatctaatgccgcagctgatctgagaggaggtggagctcaggcgatactgcgagtgacggggactgactgtaaatacagatgaagattcgctcactcgcctgccactcactgaggcccagttcctaataggccacatggcccgttgtttggggacccctgctatcgaccactgaaaaataatgggtttactctgagtaaacgggaaagccattggaagtggccatgttaaatgttacccgagccctgtacccctggatatcagcaatatcagcaatgatgaaagaaatctctccattgtttctgttattagaaatggcttactgcatgaaccacccttccccataatgacttagataaggcttggggatgacttccttgttacctagggcgaggccagatgcagaccttccaaattcccattctttgtctcatacgtgattagctgaactgtttgtccccatgaccaatcagaacaaaatgcgaacaatggagagaggctataaatacagatgaagcttcatttgttcgtccgccgctcacctcctgctgtgcttcccagttcctaacaggccaaggacccgtactggtttatggcccaggggttgggacccctgttttaggagcatgtattaatataacatgatttgggtgggagagaatagagtatggacaaccagttggaagacaaatgcagtaattctgtatgtggagagaagacccagaactgggatggtagaaagtagtgggaggttgaatgtgagagacagaataaagctccaaatggagagaacttagtgactgattatccgtgggtcatctgggttccacattttttgaaccatatcagccatgttgattcatgattacattttaaaagcctatttcaaagtttcagaaacgatttccaaaatgactatttattaagaatgcttatggtgttaattttgttattttttcatcagagatcatatataatagtttcagggtttttttttttttaatatgtgtgtgtgtatgcgtgtgtatgcaaacattatttattttgtcaatttctttttctcattttctccaaaataattagacttgcaaagactagatttatttttacctcagcaccactttatcaatactcctttctaattatagcctgtctaccttagacatctgaggacaagattactgtttagtgtctctgtaattggcccaagaaaacactccgagtccctggagcatcatttctaccaggaaacctggtagaaatgattactctctttcttcattcagtgaggcattgaaatcaataatcactacacatttcctaaatgtcaggagtctcatcctaggatataagggagagctggattttgctccaaagtggtcttgttttcaatttctttccactgcttgcaatggtccattttttactagttgtcacccctgttggtaaagcccaatacctttgcactcagctgcaacagcatttcctacggacttcagcaaccacaatgatttacgcctggtatccttaggggcttccactgagggaagcacctggaaacaatgcctctcagcagttcctcctctcctcttttttcccccttctcttctttttaaagaaatttatgtagagcccaccatgacccaaataccatactgagcccttcatatgtttattttagtttaatctgcttacaacctttcaaggtagtaattatgatgtactctttgcagaaaagaaaactgaatctcagaaatatccatcgggattttggagtctggctgactcaaaaactcatgctttaactcctaaaaacctcctcatgttggaggttctttgttttagctcataattgtcttctttatgaaaaattttgatagtccctgctggaaaagctggaatatctgtctgatctctcagccctctagaaggtccaggttgtcctgaacactctacttaatgcaagcacgtgagctcccactgtttcatgaaatggtgatataattcttaaagggcacctttgtcaactaggcacagagtcacacctaatggttgtttgtttgttcttattacacaatcccaaggggaggagatagatatgtgtgtgtgtgtgtgtgtgtgtgtgtgtgtctttcctggctgttgttaactactaggtacttgggttttgggtagacatctggatctagtttttttaatataaaaatattgttaataatacctacctcataggatcattgggccatttcataacagcttattgaaagtgcttagtgtgatatctggcatgcactgagtaatcagtagcagctaataatctctctttcccttctctttttctttacatcaaatacattatttcttaggaaattataggaatatatttgtgtctcattgtcccaagttctgaatgctgtaattatcttgattccacagatgctttgacgataccagaatctaccccctactggtgtacatttttcatcattttattcatttttttgcaaattatattcagcatgcatgatttttatgctgctttttctatacatgttgctgctattcacattgcatcgcccagggaaatgtaatctgttgggattacacccacgttatcctagtgctattaaatcacgtagttatgcttttaggcagtttcatctaatatgttctttggagttcattttggactcagatttggaaagtcttgtaagcgtgctttatttttttacagaatctagaacattttggagaattcttaacttttaccacatacataaactgaataactaaagttaggcaattcgtttggcttttgggaaataattagggttcatcagctatgcttcctagaagaatcactgaaccaaaaatatactctacctgataaattacaatctacttaataacctgcaaattagcaagcattagctcaaaggatgtaaataaaatgagttccaaaaataagaggcttaaacacaaaatgacagctcaaaagatgtatggtgaaaagtatactttcaactatatttagaataaaagtttgctaaaatatttctaaggctgatcttttagaaatctgtatctccatatgccatgacaaagatcaatatttatttatgcttttacaataaaaagcagtattgtctttctcctctagggcctgcagtaataaaatattttacagctcctttatattttataactttaaattttcattgatgctaggcaaggaatagtgtagagatgtagtcttctttgtgaaggacttttaatccttaattaatcatttatataaatctattgcagagtggcctttggaggattaatgaggaaatgtttcaaagtattttctcattaattctcaaaatcttggataacaggctttagacaaaataagaacgattatattactattgttcacaaaaagaaagctagagtatcaagtaattccttaactaaattttatagaatgaaatatataaatcactaagaatttaattattaagactaagtgctacccagatcacaaagtatctcatgctgtattacagaccatgagttagattcttttcacaactttgcaatgaatcatactggaaacacttggtagcagatataacccctattattcttttatgttgtcagtattgtttaaaatgtcaagagtttattcttaacatgattattggagtaaatagtattcaatctaacttaaagctttttattttgtggcggtgtctcagttagttgagaatcatgaaatcaagtgtaaaagtagtgtaactgaacacatagcactttgtaccttttgtgtatgtgggagacagagagatgagaaagtcaccttctccatgctccccaatcgagtaagaaaatcagtcctggcaaaatagcttgaatacaagaccaatgaaaaaacacgataaaagaagtaggaaagaacacttttgaatataggtggaatgtggggagattaattatgcctaggaggcactatgggaagagtttttggagaaaatatttgaaaaaggtccttaggaatagatagcagttctgtagagacaggctgaagtaagggtatttctccttgaaatgaatgagagcggagagattagaaagtacaatttagagaatggaattggtaggaaaagaggaaagtggtctgactagtgattaaatgactgcatttgcttggtttgtaggtagaagacagcaggcaaaagaggtcacctatagcctcagcaagggttaataaggaagtgaggttgaggtgactcagaaggtcaacgcaaaaagcatttattgagcacctattgtatgcttttgctaggagatggagacaagaatgtaaaggaggttagagtgcaatgtgaatggtgctatgatggaagtaagcctagggtaccaaagaaaccttcaggtggagcacctcatctggaatggggatgaaaggagcagtcaaagtaaaatggaagaaatcaaaggagaagatggaatgaagagacttcaaaggggaagcaacaggatttagccactgctatagactgaatggttgtgtttcatacgttgaaatcttaatcactaatgtaatattattaggaggtggggtctctgggaagtaatgaggtcatgaaggtgaaggccttatgaataagattagtgtctttgtaaaaaagaccctagagagctccctcaatccttccatcacatgaagacacatcaagactaagaaggccacctacaaagcacgaagtggaccctcaccagtcaccaaatctgccagcaccttgatcttggacttcccagcctccgaatctatgagaaatacatttctattgtttataagtcaccgatttttatggtcctttgtcatgggccctcaccagtcaccaaatttgccagcgccttgatcttggacttcccagcctctgaatctatgagaaatacatttctattgtttgtacgtcactcgttttatggtcctttgtcatagcagctcgattaactaagacagccactcaatggttgaaagaggagcaggacagagaggagttaaagatgagtctaaacatcctggtctgagcaggagggtctaagcttgtcaatcctgttaatggaattaggcagcatagaagaaggaacaactttcagtagaagacagagggctcagctctgcacatgggtttgaaacaatagcggggaagctattagaaatttctaaaaatgctgttggaattggtggtctggagttcttagggaagtcaggtatagaggtatctatgttagagtgatcaacagagagaaagagctgccaactgtggtacccaggagaagcaaaagagtaaagagggagctgtcaaaggggaagagttagtgaaaggcatccagaagggacttgtattacactggctaccaaattgttcaggttcacgagatacatggaagaaactactagatagctaggtatgcatttaaatgtacctaagtatatctgaccactttaagagaaagtattttctttcctatttttgttttaattagttgtatttagagttggctccagggttttacttatcctcttaaaacctggtaattgtaacgttgattcatgatttctttgttattgctgtttttttcccctatagttaaaactagtagaacaattagcagtcccgatcttccatctaaagacattttaggaaaaacggtagctctttaaggagctagtttattaaaaagaaagaggataataaggccaagcaattttgcaactgtcttctgcttatttccctgagatgaaagataataacaacctcttcacacagccccagttctttgattttttttttaacaaatgcttaacatcaaacaggagatgaagaaaacctcaagccaaccatcttaaaggcctattagcatttaacctcttaatattttgtggtgaaaagagtttacatatgcaattgttacagtaatagttccctgaagcccctgggggccttcatattatggtgggactacagagtttcagaatacgatttgtataataaccctaatcagaaaaataaattactcacgcttcactgtatttcaaacatagcactaattcacctctgatgtaatcaaatattgaggtgctaaacacaaaaaaacctcaagtctatattattcagtgtaccatttatatcccttaagtattgacaggaaaggtatatttaccttttatttgtcagcataaaacttcctacactgtcattagaaaaatctttaccaactcatttcatgtttctttgaatcagaatgatttcatttttctgccaaggaaatgttgccaacttcagatgtgcattaagaaaaatggtctggcaagatagcaaattccaatttcctatgatcagagaatcttattacattcatcctctctcttccttcctgttcacataggaagttaaaagatgtttttaggtttgaatttgcttagctctacattctcataaatggaaggtaatgttctgggaactggccaaacactaactacatctaagaaatgaaattctaaagcccaagtttatttctggttgctattgaactttcccatttgttgttaaatgtgcagattgccaagtagcatattgtctgtgacaactttacacaatggtggagatctgcagatggagtgtcttttcacatatgataaatgcctaatttaatgctgatttgtggcaatcaggacaatgctgcaggctctttctgctcagggatgtcttgatagtagacccaggagcagggcatgagctcaggcccaaccatgggtttatgactacagcagtgttgcccactgtccctcttaaaacacttaagctggaagggaccatcatctgataagtgcataggtggaagtccaggaaggctaggtgataaggtgaagatctctgaggttagtagtgccccaggttgggtgccactgaacaacaccaatgtaatttgttttgagaagcacccaggagcacaacaatctcaagactaaatttctgtggaaaagcctaatcctgatttgttattacaacccagaatagatcctggcacactgtaaataatcaatacatgtttgtagaatgaaaattaattaaaatgatttaaagtactctgaaccacttgtaagttttgctagcactttccctcttagtatagctttgccttatttctcctgtaatttatgtccaatttatttgcctaatctgagtgctagatagcttcctattggttctaaaatgcagttgggtatatatgtaatcatgcttattgaagattaacttaactggattaaaaatggtattttattttcataaaatttcaataaaataaaacaaaataaaatgggctccagagtttggagatactcagtttttaaagaattaagaatcagagaggctgagtcgcttgctccagaccacacagcagataagtgtcttattccatgcaagggtcagattcatctaacacatgtatctggaactctattggaaatgtttacatataaaaatatggcttatcccttactgggtccctcattttatagatcaggaaaccaatgtctaaagtggttaaggcatgagtagaaggttgactggttaatagaggtgaaattggcatatgaacaagattcttcaattccctgtccctttcttcttctactgcaccatgactcctttggctagagtgggaactcagtactcttacatgtgttggaatcatcccttgatataaaagactttttatatttactatctttggcagtaaagtgtgctccacaatggtattcaaaatactatgtaatatttaatttgtaaaaaataaaagacaatcttttacaattgacacatttccattttctcccaacaaccatccatttgtttgctttttctattcactatgctcggaggcaggaattcaaaaattaataaaacatactccttggcatcatgggattcgtagaacagaaaggagaacagatggttggggtaaaggtatctgaggcaaagccttcacagatcagaacagagacaaattaaacaaacaaacaaacaacagtaacaataaataatgacatcaaaaaaaggccataacaggcatttgttgtccgtttaggaagagatgggacttttgggtggttttactgtttggaaaatgagttttgtggtttcatttctatcctccacattccattaattccatggttccctgatgactaccatattattcctaggtaccccttttttgacttttaaaagagtttggcccatacttaatgtatttttaaacgttttaacatttactaatatagaaccttctattgcctatttccttctggtttattccctttccttctgtcattgaagaaatggttctagtggtagaaatactccacgattgagaagaatgtgggaagaaaggagggctggtgggtaagaattgctcatgatgtctccctctgaattctgtgctctcacaatgacactccaatgtgtggtttgacgcctggaagaagcagctcatgatggggaagaatccaaagcaatgtagttggaatatcatgcgcaaagaacttacaaagggaaaaagcttatcaaattcacagaaccgaaatgagggtccttgggaacagagaattatctcacatgcatattccctggcctaggtaaataagtgctaggcaaaagtgcatgagtaattgaatgagcctggaaagtttgtttctatttctccacacatgaaattcttgtttatcctttaagtcttaactgaacattggcctcctccatgaagcattctctatctaccacgatctatacagagctctcttttccttatttatttttatactaataaccaggggctgcaacttgctttactttcttgatgtctaattactttttctttccaaccagcccccaaggtccttgaaaccagaagtccagctttaaccttagtcattacctccttcaggctttaacatagttctgtgttcatggaatcgtggcttgtctgttgctaatacctgagggactcaatccaatactaattcaacaatgtcatgctcatctggaagcagtatttaatatatttggaaggtaacttaacccatttagtggttttcagatatcgggaagtaggaaaatgtatttgtatattctacaaaatatttctagttatctaactttcagcaaccatttaaatttactttataaactcttgtggttctatgaaacagtattagaactgataataagtgcaatagaggctggtgagtcaaataaaaataatggcttcacatttgacctttagcaagtaaagaattctcaagtatatagatttgcaatggttttacttcattaagtcactcagcgagactgactattggttgtttcaggaaagaaagtcataactaacaagcagagagttcttaatatcagcctctgaggtcccctgtttgccacaaagcaagtggtgcacattttccttccaaatagaaaaaataaaaatgaaatataaaagcttattagaccttccaaatcaggatcttctgtagacacactcaagacacccaggaaggcatcagtgttatcaggtatcaggttataaagaaatcagactataatcctgtgacattctgaatgggaatggaaagactggtttacaatgatagtttaaaatttaaaaatatttatgtgttttttctcaaagtccactttcttttttttctcattgcaagaaaattagaacagacacatttcaaaatctcccagcacagaatagctatattctgcagtgaataccagtgaaaccacagaataattagaaagaaaatacctaagagaaaaccaatcaaagaaaacccgacaggcttcaacaggtttccttcaggcctgagatattgaagtccttttccactctgactcttcctaaaaagaagggggggatgctttatgtaatctattgataagaaaggaggtagacagaaatcttgactcccatgtgctgctccattttatacagggaaacacattgtctactgttaaataatttttctttgtagtatggttctgttacctgcccatatcactgttcgataagctgctatgagcaaacatattatatttaatggaagttgaaagaacaggcagagggttaagttttccaacatgtatggttcacaaagccagatgccaagatatggtctaatcttctaaatatatacatttgtccattataaatcctttttccagagtaatttttaaaacaaatctcattttactatcctatcgtaaaatgtttttgaattaaccagagtctacttaccatttctctaagtatggtcaagaggaagaacaggttggttgtatttttttccatatgaggactttcgtccctctactcccacccccgactctttgtattatggacagggaaacagaaaggaaattactaagtcagggagagagttacttgatggccatgttcatctctcagtttgccatttgatgacgtaaaacataagaaaacatgaaagtgggtgccaatgtttctaacctaacagataaagtttgtggatttctgagctacattgcattactagtaataactgaaaacatagattatcagctattgtgctacatgctttacttaaagtagttattatctccaccttcaagacgagacaacggagatttagaaattaagtaacttgactagttaaaactgacactaaacctcttaattttaatctctcactatagctacatgcataaagttatgattacttaattgctggaagggaatcttcaacagacatccagtgttcacccacagagctatccagaaaaagttcccaaatcacacagatactggttcacttggtgacgatgttgctcaaaactgttccataaaagattctaatcccaaatgaaacatttcaatattattttcattattggaaaaatctccatattttaggtctccttgagtaaatgagaatgagctgcattttaaaaactactttttaatggacacattgtaattatgcatatttattgagcaaaaatgtgataatgtgatgtttcaatacatacatatattgtataatgatcaaatcagggtatttattgtgttgaccgtggatttgctttcatgaatgttcatatgtatgtcagagtttcatgtcagggcaatggacgttgtatggttaaatagtcttcaacttcttcttctaagcctttgctagatggtttttaactaaatataggcatattaaaagttctcttctcataccacaaccctgacctagctgtagttggtttacagtgggactcagatggatggaattattttttcttaacgtaagaaaaataaattccttcctagagatctgcaaaaaaatcttgtgatatagaattggtgggagtgaaggaatagaatttagcccttgattaaatacagcacctatttgccatttagaattttagtgaaagatattgtcttagaaaacttgcttcaaaggaaacattaatgaaaaggtagaatgagtgacaaatactgccaaaatttctatcatagcatcaatgattacatgagttaatgtactgatgactgcctgctgtaaatgcccatcactgtcagcaacatttttctaacaaggaggactgctgtgccatctcatgttaagcaataaaacttaggaggtgaatgaccttccataaaccatcaaaagcattcagagctgttctcctttgaatacctccaattatctaaatttataactgatataaacaggaaaatcagaattaaacgtttaaattgctgcttctccaccatttggtcttctttatctttcccattagaaccattgttagtctagctgtcttagctaattcagaggaaacatcaggggaagatcaatgtatgaatccctcatggcctatttgatgtcaatctagtcctttttatgaaacactcttcctatagatttagaatgtgttattgccaatgtttcaggctgaccagcaaaatgctcaataaacaaggcactttcctcccaaatgacacaagagtcaaatggatgctggatacttaaaagaaacaaatctttacttataacatgagattagctgaacagaacttgagttgaaacagaaaatgcctgtgagttccaagggatcataactaatattaatgcattttgctttcatccagagaaaaaaatataaagtctatgctctcttttgcctcactcctttcacctctttttcaggctgactttgttctgttctttgcacatattttccaggaataccaatattggaacagttttgaagatatagaactgggctgacactgcagtgtgttcattgtgttggctaccactggaaggcccaccagcacacttctgtcaggaagaaaagcattccaacacacttattataaagatggaggagaagggcattcacttgttttctattgaatgacttctattctatgtacaagacactgtagggaattacaacttcgtacttaaaaaaaaagtatcttgttgtgtgtacaataactttaagggtaagttcaaaagaccccaaacacttgcttttttggcttttcttttcctacttacaatggatcctttcaactctgttgcctggcttattatatcctttcttatcaccaggttaatagaactctaggcaaatttgacagccaaatatcggagtgcatccgtaaacataaatcctggtaggtgctcatagactcagaaacaaaggagaagaactgtgagttatgagagaaatggcaactaagcctttttcaaagagaaatgtacatatccacacataggtagctggaacaattaggggaagaaaaaacatcagtgaaagttaaagagagacaccttattagatttatttggggggatgattaaggcatagctcattaaaattcctttagtctttcttctcatttactttattcaccataggcatgtcaacttatactaattgtatggtggttttataagtatcgaggaagattatctgactagctgaaactactttcattctaaatcagacaactttgaaggttacattaactctttcatgacactgaatgagctagagtgttatgagttttcagactacaaagtcattgcctacactgcacatttttgttgcatcccaaaaattttaggcattttaaaatttaattcacatgaaataagtgtcacttacttctttggaagaatatgggggtacagaagttctaacctaacaatccaggtcaagtcaataaatctgactcccatattccacttcaatctgagttatttagaggaaacattgagctcttctgagggactcatcacagcctttgcttccattaagtagtcacctggtgatgtcagacatgggtagatcaagatattgagcaatcatgttagcacacctctatctaccattgcaagggtatcagaactgtgctagactactgataacaacatacataaccaccaggtgtcttgtacacatttcaggcaattttttctcatataataagaaagtcagaggtaaggggttgcttgcttgggtccagctgttcagtaatgccagcctggacctaagttactataatcttttccctcttccttcctcagtgtgttggcattttttttccttaggcttgttatctcatgcagctgttccagaaatcatatctatgttcacagcaggagaaggggaatgtggaagaaatttccagtatgcttatatctcattgcccagagctgtacactatggccaatccaagggagactgggaaaatgagtatccctccagagctagggataatgctttcccaaacaaaatcagggttctgtctttctgtctgcaggaaaaagggtagaataaatactagattggcaactagaagtatcaggtgaactatggtaaaaaccaactccccaaaagctagaaatgaggggcctgcttcccccaacaacctcaaaggactaggaagaacatcaatgagggagaagcctgcactccttgcctccttgtctccattttatagcccctccctccctccctccctcctttcttttttctttctttctttctttcttcctttctttctttctctctctctctctctctctctctctctctctctctccttccttccttccttctttctttccttccttccttccttcctatttttgagacagagtttctcctctgtcactaaggctggagtgcagtggcatgatcacagctcactgcagccttgacctcctgggttcaagagatcctcacccctaggcctcctcagtagctgggactacagatgtatgccaccatgcccagctaatttttgtacttttttgtacagatggtgttttgccatattgaccaggctgttctcaaactcctaggctcaagaaatccacccatctcagcctcccaaactgttgggaaccacttacaggtgtgagccattcacccggcctagcccctcccttcttaaggttttattacagactagtctatttctgaaagctgtgactcaacagctaacaaatgccacaaatatttctaaatccaataacagtcaactatgcaataattgacaactgatgtgcagcattgcaacagcctgaagcctttttatacacacttgtaacaacaatgaagcaggttttaaaggccagatagctgtactcaccaaagaaatccaccatctggtctccactatgatggcgttttagattagaggagtttttttttccccctccccactatcttttgaagaacaggtggttgtcctggccttccatcatggaaaggtttccctttttataaatggcaacacaaaatattccatcctgtttttttgtaactttctcctgaaatcttctgcaccaaatctgttaaagtttcttcttctcaaaatagctatgaggaagttgacttctcaagggcaaaaacctttgcagggacctcttagaatatggaaattggacttctaaaatcttcttacttgaaacaaagtaggtcaactctttaaaaagtataccagacatttttgacaacagaataccaaataaattttagataatgactgaactgaataaaatgcatggacaaggtaataaaaatgggaaagttagaatacaatgagagtaatatatgttaagtattttttcttaaaggttatatttatacacatttttaacataaaaaaggtggagaacatatttgtccttctttccattctccgagttcttttaaaagatatgggaaacctttaattataagtcaagagtaaatactcctactgtggttcactccatccaggataaatccagaatcacaaggaaaatctataattgtactgatccctgaacattttgcgtttcaattttttccttctccttcttttttttttctcctccacctcttgttcttctattccagtaaatatcctgctacactataggcatttgacagtatgatattaaatgacattgcaccctataaatcttttattcatcctacaaaatctttgtaacatacattacaggatctaaattactgcccagtaaggaaaatcatctcatattttagaaaccatctctaattttctgtggcttgtgctatctcctcttcttcagtttaaaatagtgtgtttcagcaaagagcaaataagtgagttaaagactaatttactttatattttggcatcctgtattttaagtaacttttaaatgtattaaatagaattatccataaagaaggaagataaagctaagtataagtttcttatacatctaagttttaattataaaaattaataatatttattttgaataactgtgtcctttgtagagttgttctgaaacaccgatgcaacccttatctgtgaaaatgtctagatctcctgggacagagtaattgtatctaccctaaattcaagatttatctgtcatttgacaataagtcatgtgatactgtttgtctgaattatactttaatgtttaatcataaatatttttatgcattatttacctccccaattagacttcaaaattcacaaaatattctgattttcctcagtgtcctacacaccataggctctagattaattacaaactatgtttctcaagcttaactgataaacttctttttacaaatcacaatccagtttaagtgcatatagaaactacctaatacagaaaatcaatatgtaaaataaatcaatttttcacttactttgaattttcttaaaggatttttggcagaaacttcttttcaagtgctttagttttgctttctgctgggactttaagtttttgaattttctgcctaaagctcattgtgcagtctcttcatcaatactcaaggaatcaagaaatcatccaataatgactccctcaaccagcagaaatcaggcccacatttttgaagtctgtgtaattgtaagtacagttgtagatctgtcttccattctgaagatataataacacatgttgtataatactagtataattaaagaacacaatgaaatgtttctgaaatgcttcagaattaagacttcagtattttaacaggaagtgccaatctggtcaaagtcatcaggttctccagaaatttatagcaaagactacttggcaggaacccaatataagtgacacatacagagaaacacacatacatagacacgcacactcataaacacataagactgtaaaaagatgcccttgttacacaaagtggcatggaaaagttggagataaacagagcccatttatataatgaagtgccagaaaaagaaaatcaaagaaaccagttggtctgttttttgtatgtgtcatagatcaccatcacctataaattatctgtatcaagaagctattagctaatactgaggagactagaatatcttaaactgagccacacaaaatctctgatataacatctttttttgatatttaattcaaaacttaattgaatgttcatgcctcagtggactatttggtacattaagatacaagttctgtcagaatgaaactagtcatttttagatcattttgatatttgataagactcattcttctttcattctgtttgatcatcccttgtgtggaaaagccaaagaaaatgccaaacacttatctgtcataaaaagtgaaatatctctagcaggaatccgatcattcagtatcatcgagaatctcacgcaaatatcatacataaaatatttttatgttatgattcaaacgtggagaagggaatgagtctataccctgtgtaggaaggcagccaagtactttatcaacatgcttttacatttggatttcattccattataatcacaatgatagcctgtgtggcgtgcataatgcattctacatctagaaaatggttatgtctaaaaattccattccttccctttctgtgataaagatttgtcttcaacatcatcaatagctgaagcaatgctcatctgtgaccatctgttcttactataaaacagtagattttggcagaatttgcaagcattgagcttgtcggaacgttagaacacctgtttgatctttaccatatcagatccttcagatggttgagtgtaaatgggaggttaggtatagggaaaaaagggttttattatttcttttgaaatggaaaatataaaaattttttcagttgatgattattctctactgttaaaaaaatttatatactaagtattaaaaactatgattaatattgaaacatctaaagttaaatgaggaaaatgtacaaatacagttttgattgtccacacacaaagagattgttaatttcatctactgaacacatatcttgttatacagcagtgtctacatatcgtaggtactcaatctgagcattaattagtaaatgaatgaattaaagtgtatttgattctcataatgaaaggactttgcattaataatatttccatctttatagatgaataaaggtgatgctggaataatttgcagagctgcaactcagagtgattccttctgcctcagtcacaggctttccattaggcaatgagagtaacctggtgtaagatgtgtgtcctgtattagtaacctctcagtagatactaaagagactagaaataccaaagtctggagttgttggtttggaaaagctagccagaggaagtgactttgagtagttttgtaagcagaaagcaacacctttgagaagctaggaggtaaaggaaggaggtggcatgtgaatccttggaacaagcatgttcactagagcagtgtcaaaagcaggcagtgaggagatgtttctatttacgcggagggaagaataattgggagaggaatttgaaacctataattgggagcttggatttgatacaaagctgaattgggaaagtgattgatgtgactaaaacaacagcagtgatgagtgctgctgctgggtgaagaatggattggcaggccagggcagctggctgcctggaaggctggcacagccgtacccaccccatatcagttgctgatgtcagtggaccgacccaagatgaagaaacgctattgggacaggatccacaagctggagcaatggtctccaggctcccttaagcccttaggtctctatgcccttagagaaatcaggatgagttacgtgatgacagaagctcttcctttttctttttgcttgaaatgtaatcttttttgtgctatttagtgtatcatatttgtatgtgaactccagcaaagtattttttgttttgttttgttattgaagcacctccaaaacattctgagggaatttaaatttggccggacacagtggcttatgcctgtaatcccagcactttgggaggcttaggcgggtggatcacccgaggtcaggagttcgagaccagcatgagctaacatggagaaaccccacctcaactgaagatacaattagctgggcatggtgacacacgcctatagttcctacttttattataatataaaataatacagttgttgaaattggatggaaatttaaagattatcttgtctaactgttttacttttcaaactaggaaattgagactttaagagatgaagtgatttcattcacacattcattcattcttttagcacaagctctggagtcagattcatcttaggtttgaatcctggttttttatttattatctgggtaaccttagaaaaggcatttgattttctcggtttcttcatctacaaaatagagataagtatggtgcaatagttattatactatgaataaaacattctttttcaaatcactatagtgtggtagctaatggtgtacaatctggagccagactgcttgggtttaatacccaactctactactcacaagcaatgaaaacttggaaaagctgcctaatccctctgtgcctcagttccttcttttgtaatgtggggtatgtataatctatatttatatagcatttaaatgagaaaatatatttgtatgttttaccagacttaaccttcagcaaacagcctggataaatgctcactatatgtagggctgttattgtcattactctcattgcttttggttagtaccgcttgcgtgttgggcactgaattgatgtagaatatacagagagaaagacacagctccttccctcaagaattcagagtctaggcagatgatgtaaggaaagtaacaactacaattcagtgtgataagtactagcatggaggttgccccatctctcctagagctcaaagaggcctgagtgaatcaggatccagtcattacaggagagtcattggagagtcacttgagaggtggcaggagtggtcagcaaacccttcagggaggtgaagcattagtgcgtgtgtgttgggagcctgcagaacagagaataaatcagcaaaacagagggcaggtgctaggttagagaaaatccaacagtcggtggttgttttgtaccgctggttgtaggttgcacatgaggaatagtgagaggtagggctgggtagtcacaaagtggattgatgaagaagggccttgtattagtcagggttctctagagggacagaactaattggatatatgtatatatgagatggagtttattaaggagaattgactctcatgatcataaggtaaagtcccacgagagaccatctgcaagttgaggaacgaggaagccagtggtggatcagcccaagtcccaaaacctcaaaagtagggaagccaacagtacagccttcaatctgtagtcaaaggcccaagagcccctggaaaaccactggtatcagtccaagagtccaaaagctgaagaaattggagtctgatgttcaagggcaggaagcatccagcatgggagaaggatgaaggccagaagactcagcaagtctgttcttctgtcttctcctgcctgctttattctagctgcactggcagctgattagatggtgcccacccagaccgaggataggtctgcctttcctagttcgctgactcaaatgttaatctcctttggcgacacccacacagacatgcccagaaacaatactttgcgtccttcaatccaatgaagttgacattcagtatcaaccatcacaggccttataaacacactgctcaactatgtgcactttagcctgaaagcaatgagatgcaattaaaagattttaatcggcgggatggcctgattaggttctctttgccaaaaattgatgagtgccccctggatccacttctgtttgagtatatggatactgcaacatattcacctgtttaacttggctatttccccttctcctgacagatggtaaattccttgaaggcagtcatctggctttctattcccaacatctgtcataatatctataagtagccatttaatatgtttagaatgaacaaatgaatggaaaagactgcaagcaaatattcaattaagatgctttttcctccttaatccatgagaattgatacggatctaatagtggtggtggcagggggctcagaaaagggatgggttcaacagatatttaagtaagaatattgacaagccttggagttagaggctgacttggaggcaaaaagaactaatctagaatgaccttgagatttcaagtgtggtcaactcagtggatgatggtaacattcactgggagtgaaaacccaggggtaggttcacagatgaagagaatgagtgtatttctgggcatgtctagttcaacgaacctgcggatcaaatgaaggaatgtctaggaggcatgtggatagggagatctcgtcaaaatccttgagaatcacaccttttaactcacagttcattgcactttccccctttgtaatgcctttttgaaagaaaaaacaggcaaacaacaactacaagaatattaaagcaatttgtacataaagattttttaatggttacaaaatcaaaagggatatttttcttgaccatgtgtctggaatgcccttagcccatccatgtctctcgaaaagatccaaggtgaacagtaactcctccaagaaatcttgccacatcctcccagatgtaatgaacattcacgcagcagttgattttactttgtctatagcacttgttgcagtgtattcaggtcttcatattggtcttcctttaatacatgcaggacagtatcatcattagtatggattttggaatcagacgtataagattttgaaatttcagctttgccacttagctgaatgatctggggaaagcagtttaccttctcttagcctcgggttttcacatacgtgaaattcagaggacagtagataatgtgaaggtttgaaggcttccactgacttctcatcatactcagtgtagcactttcatctcctctccttgtttcctttgctccagccacactgacctctgtgttgtccctgaaataaccaaggcacatattttctacccagagtgccctccccacaactacctgcatggctatctccctcgcttttttccaaatattttcactaaactgatattctatcctatagctacaatagagaagaaaatgctgctgagtctaatatggaacacctgcatgcatattgacaaaggctggaagcaaatacactccaaagggaagttgtatcagtgaggcgaattgtgtgcaaactgttctcctgatacattattgcttttgatgtagttttgtcatttgaaatgcaattaaaaactcaatttctcgtgagcttttcccctgggtaccctaggtaaaatttcagtatcacactgcaatattttccttctctgcttcattctttccccttagcatttattgcaacttaatatgctacatattttacttatttttgtttgtgtaccaaaaaggaaaacaagttctttgaagatggggaattttgtctgtcttgttccctgccatatccccagtatctaggacaatgcccagaatatataggcactcaaaaaatgtattttgaatgaatgaattttatatatacattgcttatcacagtatctgacatataacacatatctgtcacatagtagctgttaaggttgtgaattttgctaatattttgcaggatctttagaagtcaggaaatacactgtattcactatcttatgacttctactacagaggaagcctaagagataaaagaatgaatgaactgaccaattctatgtaaagattagctacttgggtcactattggtgatgtggtggctgcctcggaatcaacactacagagctggagagaggctggaagcagagtggactcagcacagtggctctgtaaacgtgagcaaccccacctcaccccatccaaactcccctcatttttagaaaggagcttattgtcaagggcactttgtagctcttgcagcctctgagtctgtgggttccaaaaggtgaggcaaaaggcaaaatcttttacccccttaacctaaaaaactcaaatttccttacaatgaatgagaagcggatttaaaacaatcagattacacaatacttcatatagtcctgtgtgcatgtgtgtgtgcacatacacacaatctcgacctgataatttttcatgcctttgtctgagtgatttgtagcaagtatgaaggtatttccaaagtgttattaatgacttagaaagtgggaactgtgtcaaaaccaagcttagctagttcggtggcaggtggtaccaagaggcagagtgaatttcaagttgaaattacaaagaaccattgatcctgacagtaaagcatgcctgcaaatgaaattgacatggaatgatcctgacgttgaaatattatcttaaaatcttgaaaagcatggcagagaattcaattatataactaaggggaattggagaaaatgaagaaattggtagcgatctttccttcaaacatgtattttcctctataggtcaggctcactttgcacataattagttacccttgtttctcacttcattgcttaatcaatttcaataatgatttagctttattattagaaaattttacattcatgttaaacccaaaacaaatttgaaaagctgcagaagtaatttgagtccaggttataaaaaataacgttagtccaggacttggagtgaattaatgtgacatcttaaaagctttgggttataatctgggttctgccacaggcagccataaaccatgggcaagttatttaatctctgatttttagaatctttagctgtaaagcacaagcataataattcccacttcattgtagctgttctgaagcacaaatgatatatgtgattgggccaagtatataaaacaagactgacaaagtcattttgacatatatttgaataaaactgccatatcttatcttatagacttgaacaattgtgtaaagccaggaggaggagaaatatttgcagttatattttagagatgaggaaacatgatcagaaggattaaagtaacttgccctagttaccaggccgagttaaatttcatgtctttagcttcttcgcctactgagtcttaattctaccactcatacatgttctaataatctgttcttgggtgaatatcacaagaatcctggtattaatagaattttccccttttctttcctaaagacctaattatactttaaattacttgtttctgcagcagatacctttattctaccagctgcaaacagcagaacaaaagtccctgccccatgaagctgatattgtggtgcaattcactcagccaacattcctaagtgctacgatgccctcgacacagtctgggaacaagtcccctcctaacattgtgggtgaggaaatacaccaggaaaggctgacagaagggatgacagggcaaaaggttctatgggcacaggtcaggtgagggggttagttcagccctaatgcatccagtaagtcatgccagagacactgactaataagcttggtcttagactatgagaggacaatctagttacctgaaaccaaagtagaagattccatctggaaaaagatctccccgttgctttaaaaattagtatgtttggtttcgtacctaaaaagatagcatacctgctgggttattagaccatatgcaataattaggcttcttaacaaaaagacaattaatagttctttaatatagtgtgctttttagtggattcagaaatcatgctgatagcatacttttcttatagaattttatgagaaaaaatgcatatgaaattgcacattagcaggcaaaggtattttgagtacacaaataagtattcaaagtagattttatatatttcaattaacataatagttggcaatgagattcgggaggctaaggcaggagaatcgcttgaacctgggaggtggaggttgcagtgagccgagatcacgtcattgcactccagcctgggcaacaagagtgaaactccgtctcaaaaaaaaaaaattgtgaaaacatctacttatataatctaatggcttttttcatattcttattgtaatacaacatatctgggctttctctaaaagtcagtttttaactggccttctttttaaatgatttaccaaattgaaatgagaattaaattttgaaatcagctaaatatatacaatattgctcaaagtgtcctgaaattactctgaaggactagcattaacaacacctaaatttgtgattaggtctgaggtcattcagggctttttgttacttttgattgttttttaagacctactacagtttagcttcgagtaagtatgcagtcctggagcacctaggatttcctgatacacttttgtacaataatcctttctaagcttggctattattgctgccttccatgcctatgcaggtttgtctgactggcctaatggatgttttaaatccagtccttcaaagtttttcatgcgtcttttcattcttgccttgctgtcctgatcagtctcttgtcatagtcatgtaaggaagtatagtatctatagagtgataaggcatgctgctttacctttttttttttttggtatgttttgctattacttaataaacatatttataaaccactcccagagctgataatctagttctatttttaatctcttaggacaaaatttagagaataacctcaaggggactgattatagagatgtcattttcaggtgaccagagggaggatttggggacatcttggtggcatgtactctatgctccttgtgccagggctgccccagactgaagtagaagaaaatgatgcagatggacttactcagttgaactgagatgggacagaaatcgtcaggtcatgctgaggaagaattaccttcccaaatgtctcagacacatgcccaactaaatgcttattacatattcagtacaaaaacacactgattcctttagttagcaaagattccttaactaccttctatgtattaagcactgtgctgggtacagaaaacacatgataaatacattttctatgtaaggaaaactcaaagtggcaaatgctgagagattttgtcaccaccaggcctgccttatgagactctgtctcaaaaaaaaaaaaaaaagaaaataaaaagaaaaagagctcctgaaggaagcactaaatatggaaaggaacaactggtaccagccactgcaaaaacatgccaaattgtaaagaccatcaatgctatgaagaaactgcatcaattaatgggcaaaataaccagctagcatcataatgacaggatcaaattcacacataagaatattaaccttaaatgtaaatgggctaaatgccccaattaaaagacacagactggcaaattggataaacagtcaagacccattggtgtgctgtattcaggagacccatctcacttgcaaagacacacataggcttgaaataaagggatgaaggaagatctaccaaacaaatggaaagcaagaaaaaaaaaaaaaaaaagcaagggttgcaatcctggtctctgataaaacagactctaaaccaacaaagatcaaaagagacaaggccattacataatggtaaagggatctattcaataagagctaactaccctaaatatatatgcacccaatacaggagcacccagtttcataaagcaagttcttagagacatacaaagagacttagactcccacacaataataatgggagactttaacactccactgtcaatattagacagagcaacgagacagaaaattaacaaggatatccaggacttgaactcagctctggaccaagcagacctaatagacatctacagaaccctctaccccaaatcagcaaaatatatattcttctcagcaccacatcacacttattctaaaattgaccacgtaattggaagcaaagcactcctcagcaaatgtaaaagaacagaaatcacaacaaactgtctctcagaccacagtgcaatcaaattagaactcaggattaagaaactcactcaaaaccacataactacatggaaaccgaacaacctgctcctgaatgactactgggtaaataaagaaatgaaggcagaaataaagatgttctttgaaaccaatgagaacaaagacacaacgtaccagaatctctgggacacatttaaagcagtgtgtagagggaaatttatagcactaaatccccacaagagaaagcaggacaaagcaggagagatctaaaattgacatcttaacatcacaattaaaaaactagagaagcaagagcaaacaaatacaaaagctagcagaagacaagaaataactaagatcagagcagaactgaaggacatagagacacaaaatacccttcaaaaaatcaaccaatccagcagctggttttttgaaaagatcaacaaaatagatggactgctagcaaaactaatgaagaaaagagaggaaaatcaaatagatgcaataaaaaatgataaaggggatatcaccaccgatcccacagaaatacaaactaccaccagagaatactataaacacctctacacaaataaaccagaaaatctagaagaagtggataaattcctggacacatacaccctcccaagactaaaccaggaagaagttgaatctctgaaaaggccaataacagattctgaaattgagccaataattaatagcctaccaaccaaaaaaagtccaggacaagacggattcacagccgaattctaccagaagttcaaagaggagctggtaccattccttctgaaactattccaatcaatagaaaaaagagggaatcctcccaaactcattttatgaggccagcatcattctgataccaaagcctggcagagacacaagaaaaaaaaggagaattttaggccaataaccctgatgaacatcgatgcaaaaatcctcaataaaatactggcaaaccaatccagcagcacatcaaaaagcttatccaccacaataagtcagcttcatccctaggatgcaaggctggttcaacatacacaaattaataaatgtaacccatcacataaacagatccaaagacaaaaaccacatgattatctcaatagatgcagaaaaagcctttgacaaaattcaacagcctttcatgctaaaaactctcaataaactaggtgttggtggaatgtatctcaaaatactgagagctatttatgacaaactcacagccaatgtcatactgaatgggcaaaacctggaagcatttcctttgaaaaccggcataagacaaggatgtcctctcttaccactcctattcagcgtagtattggaagttctggccagggcaatcaggcaagagaaagcaataaagcgtattcaaacaggaagagaggaagtcaaattgtctctgtttgcagatgacatgattttatatttagaaaaccccatcatctcagcccaaattctccttaagctgatgagcaactttggcaaagtctcaggatacaaaatcaatgtgcaaaaatcacaagcattcttatacaccaataacagacagagagccaaatcatgagtgaactctcattcacaattgctactaaaagaatcaaatacctaggaatacaacttacaagagatgtgaaggacctcttcaaggagaactacaaaccactactgaagtaaataagagaggacacaaacaaatggagaaacattccatgctcatggataggaagaatcaatatcgtgaaaatggccttactgtccaaagtaatttatagactcaatgctatccccatcaagctaccactggaaatggaaaaaactactttaaacttcatatggaaccaaaaaagggcccacatagccaagacaatcctgggcaagaagaacaaagctggaggcatcacactacctgacttcaaactacactacaaggctacagtaaccaaaacagtatggtactggtaccaaaacagatatatagaccaatggaacagaatggaggcctcagaaataacaccacacatatacaaccatctgatctttgacaaacctgacacatacaagcaatggggaaaagatttcctatttaataaatgatattgggaaaactggctagccatatgcagaaaactgaaactggaccccttccttacaccttatgcaaaaattaactctagatggatcaaagacttaaacataagacctaggaccatacaaatcctagaagaaaacctgggcagtatcattcaggatataagcatgggcaaagacttcatgtctaaaacaccaaaagtgatggcaacaaaagccaaaattgacaaatgggatctaattaaactaaagagcttctgcacagcaaaagaaattatcatcagagtgaacaggcaacttacagaatgggagaaaattttttcaatctatccatctgacaaagggctaatatccagaatctacaaagaacttaaacaaatttacaagaaaaaaagcaaacaacctcatcaaaaaatggtcaaagaatatgaacagaaacttctcaaaagaagacatttatgcagccaacagacatgaaaaaatgctcatcaccactggtcattagagaaatgcaaatcaaaaccacaatgagataccatctcacaccaattagaatggtgatcattaaaaagtcaggaaacaacagatgctggagaggttgtggaaaaatagaaacgcttttatactgttggtggaagtgtaaattagttcaaccattgtggaaaacagtgtggcgatcatctagaactagaaataccatttgacccagcaatcccaatactgggcctatacccaaaggattataaattattctatgataaagacacatgcacacatatatttattgcaacactatttacaatagcaaagacttggaaccaacccaaatgtctatcaatgataaactggatcaagaaaatgtggcacatatacaccatggaataccatgcagccataaaaaaggatgagttcatttcctttgcagggacatggatgaagctggaaaccatcattcttagcaaactctcacaagatcagaaaatcaaacactgcatgttctcactcataagtgggagttgaacaatgagaacacatggacacagggaggggaacatcacacaccagggcctgtggggaatgggatgctaggggagggttagcattagaagaaataccaaatgtaggtgacaggcgatgggtgccgcaaaccaccatggcatgtgtatacctatgtaacaaaactgcacgttctgcacatgtatcccagaacttaaagtataataatcattaaaaaaagaaaactcaaaatattgtggacacttttttttgggaaaaaaaaggactcaaataacctaaatttgtttttttttaaaactgaaattggaactattatgactatatagtgtatgaatgaatactgtgtaaaatcagcaagagcagggactgagtcttgctcacttttgtgttcttagcttaacacaatccagccagagaatgaatgagtctgcaatgtttatggagcaaatggatagactgatcagtgcagggtgttctctgactgttcagccctcaatgactcacgcttctcagacctactgcaatcactttcatggggttgcaatgattttacatgtgctagtctctttttatcgatcagctgttctgattgaaacatgtacttgtgcagggaccaggatgggcccttctgaactccccggaagcatgtggcagagctatggaaagcaccctaccaagggctggaaccaggaagtgttgacctgagccagaacactgtcatgtacccagctctgttctaacagatcaacacttctcagtggagtcctttgtgttaggactgctacccaaggcccttctctggggagggtatctcaaaattcctcctgcctcccacagcgttcatgtggccacactctgggttaaccgacatgctctgacttcagagttccaaagggtcacaccgctatacgtgctgcagcaattatcaggccacacgaggtcctctctgagcctccgagcggtctcatgatcctaggcagtgtgaaacatactgaaaatttagaatcagagggtcagagtgccattatttaaaccaactcattttaaacctggatcaaagccaatggctcagagcaatttagaaacatgattatttgctgactgagtggggccaaattttggctccttccttacttgatcatgacaaagtatttgggaattcaaatctgaaatcgtctgttacccacacagagcactcccctttgtgtattaaagagcaagttatattaagttacactgacttctcccagattcaccaggaaggaggaaggctgggtcctagaaggtctataaaatggacagttaaaatggcccaagcaaagggcttttcaaaacttatttttaaaaatttttatattatatatattttaatttttatattatttattaatttatttgagacacagtttcactcttccacccaggctggagtgcagcagtgcaatcttggctctctgcaacctccgtctcctgggttcaagtgattctcgtgcctcaacctccctagtagcagggattacaaacacgcaccatcatgcccagcaaattttgtatttttttttttttttttttttttttgagacggagtctcgctctgtcgcccaggctggagtgcagtggagggatctcggctcactgcaagctccgcctcccaggttcacgccattctcctgcctcagcctccgaagtagctgggactacaggcgcccgccactacgcccggctaattttttgtatttttagtagagacgggattttgccatgttggccaggctggacttgaacttctgacctcaagtgatctcccgacctcggcctcccaaagtgctgggattacaggcgtgagccaccgcacctggcccaaaacttgttttttttgtttgtttgtttgtttgttttaaatatctgttattgcccggtggagtgtgtgtatgcattttggggtggtgtaatttttttgaagcagattttataagaagcaaagaaatatagaggactatcagctgaaaaatatgctagataggaaatacagcaattcgttttttcaatctttttctcattaatggcatggaatttcactgaaaaggtgttagaaaaggaaaataatttcagctcattttatatatttgagtttcattgtgtgctacaacttattgctgaatgctacaaaaccaggctttgttctaatgaaatgtaatcctcacatggctaaaagaaacagctgagaaagctatatattttatatcaaatacctttacagatccagttaaatgttagaaaacctctttatgaattatttttaaggtacaatctaagaaacttcaagcttcagaaaaatataacatactgataaaatattttatttcaaaaattgttaagttgttttgttttccattatgagcagtatttaattgttttttaaggtagattgacacttgttatttcatctgtttactgagttatattcaatgccttatttatttttattatatgtttgctttacattttacatctattcatctagcttttggtttataggctgaagaggtttaagaaatagttgaaggcaacaaacagaaaagaagaaaaggataattcaggaggggaaataaaattaagacaaaagagttaaaatagtatttagaaccaattatcttttcaaaatttatttatttctggatgtcacatttgataggctcatgttcttgaattatttggagcacattcctctgttttctcccatttactccattttagtaaattttatttctgaataaaataattccttaggactaactacatgaagggttaaactttgattgcaacatattcaatactatatggtgcttattgcatttaaaactgaacaaacaataaaatttggggctttcgtgaaaagtaacttactacagacctgaaatcttttgcttctctctttgagatgaatcaataaaaataaaaaaaaaaaagccaaagcaaataaatctaaagtttctgcaaagcacacagcatgcaccttcaattcacttcctctaaatttgtatcaatggaatgtggtcattgctgctttttttgtttttgtttttgtttttctactcttacagaaaaaaaaaagaattcaatacaatctccctcagtggaagaataaatatcaaaaatgaaattcagagtccctaaaaattgcaatgcttttacctgttactttttgttttttggttaatgttgcaaattttgaaaactcaagtgtgtgccatactgagaagaaaaccaagaaaatttcaagatttttgtaaaataatcaatgttctagatcatacaaaagtattggattcattacataataattagatgcttaatatattcaaagaggtgacagacgtgtcccccgaatcatagtctgacagtctccttcaatgtattttgtaataattatttttactagctgtgaacataaataagttatattgtaaagagaaatgattgagaagaatctaagttcagctaacgcattttaatcaattaagaagttatcacgaatttctagtttttaaaatttattagtataaaaagaaataatcaaaaggcattctatatgaatgaaaataagagctaaacctgacaaaaacagaaagctgaaggacaagattcatttttaccggtactactgcctacaggagtctcattctgtccataatatgctagtgaattaaaaaacataggtgcaaaaaagagcaatttagtgtataatcgtgctaacttttaaattcttactttatcattagaaactatgtcagtccattctgtgttaaaaaccaacaaaatacagttaaaattaatacagagctacaattttatttaagttttactattgttttggtgaaaactgacttctattcatttttaaaaatatctctcagggatgtagaatcttcatctataaattaaacaagttcaagcaagtggtcccattggtcttgttaaatataataataattaacatttattgggcacttattatacaccagacattgttctaagggtttaaaaatacattataaaagctttaacatttgttatccaatttctatagccgaaaaaaagaggaaaaacagaaatttttctgttgagttatgcaaatcttactcttataattttatttacacagaaatgtatatgaaaataatcatttttataatttccctaattctctaataactcagtttcctagatatcaaccacttttcaccatcttccatcttctactgtgacctttttccccttgttcctccttgtcaatccccattttctatctcatcctgtgtcatgttggctgaatctaccttggtccaatttcctgctggtgctcttcttagagctggccaaatcttcagcacggtggaaaggaagccgaacagcagagcgtaccttcaggagttttctactcactccttccacagaagcaaacaaaaaaattaaccaggcatattcttcaaaataggcctccaacatacattttcaaaatcaagctacctcactagtcgagacaagctgcatctcaggcatttgtatttcatgatgtctggtcaatgtgattcattgtaatataaaataaagtatatttttctagtgtgttacaagtaaacaggtaaccagtattattcacccatttatttaatagagataaacaattacaactcgatttttccattactcaaatgagtatagaaacttcaacaatgaacaagatttctcttttaagagtgacactttatttcatttgactaatataatgttggtctgttcataaattattcaatgaagtgctaaaagcttccttcctctcaagtatttcctctgcaaaatggctttggtagatgaattattttccatatgaacaaactaagtaaactttcaattttgagtactgaaaatctttgtaagaatatttttaaacacatcactttttaaaataaatttatgttttatttttaaaatcttcccgtgtttgttacacattgtatgcccattttcaaagaaatttttatttaacaaactatccaactttagaaaaaaatatttgtactctaataaatcaagccacgaaatttttaaatctaacaatcagaaaatggcaaatataatatttaacagggatctttaagggccctaaagataaatgtttaaagacttaaaaacaagaaaatcattttactggctgcttcatctcatttttctttatggccctataaaatatttaatcaaattattggctcctttgtgaggttttatagtagttaatgcaagcaaaacataagtaaaatttctgagagatctctggtcattaatatgtaattatgttacattatgttctactaattaaatagaatattaaataaaataattaatagaatatttaattaaatagaatgttactaaaatatggcttcaaataaggcaactctatactcatgagtttgatatctttctatgtgttacttaaactcagcacattttaacacattcaaactaaaatagctttcatttacattgttgaaacctaagctaagcagtaataattagaaaaaaaataaatgacagattactttcaaatcagatgtggtttagttctttaatcctgaaaatcctgagcagttggcaaggtgctcaagaaatcactttctgaaaaatcacatgggcatttaccaaggaatccgcagagaagcggagagagcctgggcgtctgggaatcagcaatatggagctatcatttaaaaatctttattgaaataattacatgacgagtataacttttatccctcagaagactcagggatgaataattttaaaagacatttaattacagacacatggacaatataatactgtacaatggcaagctgaaccctcgtctgaatatgctctcaagaagcatgatgaccttgaatagaccttttccattaaaggtgacattcagtaattgcattgtttgtaactcaaagtataaatgcttgagggaattgaaactccattctctgtgatatgcttatttcacattgcctgtatcaaaacatgtcatatatcccatgaatatatacatttactatgtacccacaaaaaatttttaaaataattttaaaagtttttaaaaatgttgacattccaacccactgcttaaaaagaccttcgaataaattcttcagaattaaacttccatgacatgtaataaacttgttttttgcccttagttttgtctaaacacgtggggatccttcctatctagccttgttcacacttatatctcaggaagtcaatctccgtaaagcaaaaacagtctttaattgacttctgtcatttgagaggcctgagaagggcagaaattagcaatgtacaagtgtttcactaacctgagagaaagtaatgactgatattctcctcttgtcaaacaaagtcatggtagatttttctttgaccttgtgatactgtgtaatacagcaaattcaattgggattataggaaattgatgtctaaatagctagaggaggcacaggtttcatactaggaaatattcaattcaataaaaattaacctttcttgtggctatgatgtgtaaatgtctggcttacgtaggccctttctaactaattataggacatgttgtactgcatcctatactgattttcacatgaagtttttcatatgcttgtagtaattttacacgatctatttatcctgaagggtcatggctacagtgtaatatagaatgctgtttttctcttgcctatgagaaagcatgattaaagaagacaattgatttttttttttacaagactgacttcgttagtttggaacagcttatcataagtctacactggcagaatattaatatcctatatggctttcacattattttgattattattttaaaactatattaagtgcactagtcatcaataataacaataacaacagctgtaataaatacagataagcctttctgtgtgttaagtattgtgcttgacatatactaactcagtgaatccttctaatactcttacatgggagttacttttttattattactgctaccttatgtgttagaaaaaccctaaatatagagagattgagtaacttgcccaaattcaaaaagagagaaagtggcaaaaccgggcaacaggacttcagaatctgtgtcatcaactactatttatttgtgaatatagggacaaaatgtttattacatctacattgaataatattctacaaaacagctgattttatgcttcaaaatggtactgcgatgaatcattgaaggccttggaactgtttcagattgaggaagattcagaggcatggtgacactatgcagccacgatcctggactgggagaaaattgctataaactatgttattgagataattgaggaaatctgagtaaaacctataaagttgatatcgttatattaatattacatactctgattgctatagactgaatgtgttccctcaaaattcatgtgttgaaaccctaacacgcagtgggatggtactggtaggcggggcctttgggaggtaatatggtttaggtgaggtcattagagtggcagccccataatgagtgagattagtgccttcataaaaggggccccagagaactccctccctcctccatcataggaagatgcaatgaaaagaagactatctatgaaccagaaagtgggctcttcccagacaccagtttctgcctgagccttgatcttggacttcccagcctctagaactgagagaaataaatttctgttgtttatcagctacctggtctatggtcatttgttatggcagctcaaatagactaacacactgattttatatcattatattgtgattgctgaatgaatgttcttgctctttgataacactgaagtatttagaattaaaggggtgtgatgtcctcagctaagaaatacacatacacacaaacacacatatacacagagagaaagaaagagagaaaatgataaagtggatatggtaaaatgatagcaattggtgaacctaagttaaaggtgacagagcaggagcatcgccatcttgcacaagcactgccattataaattccccttgatcaaaaactgcctaaatccaaagggcatcagcctaagggctaaggtcagcatgaccataaaccacaaataacatctccaaccataaatattccaaacccctccctgaccagagacatgccagccgctagataacctcccctctgatcagagagatgtcagccccaagataacctctcctctgacaagagacattccaaccccaccataaacttctcccctacacagaaacattccaagctctctcatcagtaaatactcttagtctggaagaaagagcactcctaaccaaaaatcggccagaagcccctctcaggtttattctccaaaataaacctgtctttgactattgagccactttttgggtttctttcctctttcaaaaggtatatgggaattcagagcactatttttgtgacatttttgtaaattaagttatatttattctaaagccctggatatagagagtgtgataaaaaatatttatccagaattttaatacatctcaatatgatttttcattgtagactcacagggtatatttgttccaggggttgagacctggttgaaaaccattagcaaaaggagagatgatgatgatgatacattttcttagagagggtatgtgaagagttcattcccgaaggttttattttaggcaatatcaagtaatagctacttatctatacatttacattcaaaatatacttacttgtttaaaataattagtatcaagttcacttagccaatggcacaagaatccagaaataacattcttcattacaagacatacttaataataacatattcattacatgacgtacttaatacatgccatgggtgtttaataagatatttttatgccagaaagacaccatatatggaggttactttatgaaagcaatttttcctgtcctttcaacattgaattccagtccaaagcacctgtgttgccctggcagtttggcaagaacatggacttgagagaaagatgggttcgagccccagctctgccactaactagctgtatgactgtggaagctgacttcaccattcaagttttcatcacctcatctatgaactgaagtaatgaaaacctgtcttgatgtactattgtgaaataaaaatggataactctgtaaagcacttgacacatgttaaagcacaatatatttctgtttttaaaattttacttacatatacttatgtacttttatgtaagtgggaagaaagagcatttttaatagagtatatggtagaaaaagtatccacgactttatgctgtttccagatctagtccctgaatctaataaccatttttaatatttaaagtaacatacatttcttatgcttaagcatgataaaagactaactgtaaagacctggaataggatatgagtatccttacaacagtgtagaaaaggtgagatatatagaatacacaatgtcaaaagaaaacagtagatttaaattaaagaaacactaaatatatatatatatatatatatttgtagatttgtatgtagaattgccctgactttcaactaaggcatcatcagaagtgattaaatcttatggcagtctgaatatcaattggtttttcttggtttttcatatcattttattctttatttctctattttctttttcaagttacacatatacataaaatttatgggtgatagctgtcattcaaatgaaaatacatattcagtacttaggatatacactactgattataccactaacagcctttttgtattttgcttttgctaaaataattcaaattttgttctggcacactgtgtctgggctcaagggatggatattgtttagtttatggcaggttttcacaatcttggctattgatagtttaggtaaaataattctttattgtggggagttttcctgcatactataggacatttaacagcatacctggcctcttatttctaaatggcaatagcacccatccccaagttgtgacaataaaaaatgccaccacacattgctgaatgtcctctgggaaggcattgggagtacaaaatcattgccagtagagaaccactgtttaagccaagcctagtagcttcattcctccatgagaggaattattctagggaacactatgtgaccagtgctagctgacaagatggaaggaaagatctgctgggacttccgagaaagctcccgaagtaaggcacatgaagagaaattcttcctccttctccatttccttcctgcccctatggggcagtcatgtgagaacttaagacttggggcaatggcagtcatcatgaagatgtcagcaatgccaacttcaagccctgacttgactgagctgctatgccaatcctgacctactaaccatggtattcattggcttgtttcacaaacaggccagtttccttccttttgggaacaagatagcattgcatttctcttcccccatctccctagaagtcaagtatgctcatacaacttgttttgtccaacacaatgtgtgtcactttggggcagaaccttttgagatcctttccctgccatgttgagatagagtctacatctgcttggatccttaagtccccattgtaggaaaccctgtaaatttgtattgagtgttttgtgggtgcaaaaaaaataagcccttgtggctgtaagccattgagatcagggtgttctttgttacgggagcattattaaaccacactgacacatctgcctttaaattacttgccaaataaataaatccctattgttaagccactttcatttgaattatttatattttttattgtaagagaatccaaaaggatgaaatatgttttttacataatttctaaagaaatataggtgatgcacccaaaagtatcatcaaaaaatgactgtcaattaattaatgaagactttagtgatagaaaattcttcatgtatatgtgctcattttcaatccatctattctgttaattcttttccacgctatatacatgaatccagacacacacacacacacacacaaacacacaccttccttccttatgtgcaaccatagaggatcagcctatctgtgtccagtgctcagagctgactgaatacactagaacttgatctggcatatccaaccagaccttgtaagcaattaagattcacagttgctctaaacgtacaccaactatctagcggttaaatttaaatttgatacaactaaatcattaattcattcatccaatcattcatcaattatttattgagtgcctatcatgtaataggcacaacgctttagtatattttcacatatactgccctgctagtctagtttcaaacactaactctttctctcacaggaagggaacaatttctctggatttcaggatggctggtttggtgtgtgagtactgctgtcctatgacactgtttactgcgggaacatgttgtgatgtaaagttaacaacaacagaaataaaaacaaatgtcaccaccataggatctgagtctctgcctgagtttaaatcatggtacagttccacagaagcttataagcaagttacttaacctttctgaaatgcaatagtgttacccccagtggctctgtgacaattaaatgtgtcatatatatgaagtgcccagcccaaaaacctagcacaaaattgtggtttaatccagatcccctctttgtttatctgtggatcctgaaaattatttttcaacattctagcatgtcttactcttttcagagagaaagaaaacactcattaaaacctcatgatatattccaagcccacaccttaacagtcctaaactgaaaaataattttagtaaagtcaaaaactactctgtaaaaggccaaggtgaactacaaattgagttaataaaatatgttcttatatttcctgtttattattgcaattttcttacagttatctagtttcttttctttgaaacattactatgaatgcagtacttagaaaattacacagaatgcttgaaactgaaatttacacagaaaagtaatgttcaagattggaaaaatatgtttcagtatattaatatccatattataatgttgtaagaatgaaatgagattatttatgcaatgtcatacacccctgggcacagaatagacactaaataaaagatagcttatttttgttatttttgctattacaactcaaagtgggagccagagaataacctgtttctgtaaaaaaaaatttaagaagcagcagcattagtaaggaaagctaataacctagattaatgcatcaagaaatctatgtagcaagtcatttaatatccttatatttactttaaaaatagaggataacaccttctaaatttccatccatacacatttaactgaaaggggcttggagggagggaaagaaagataataatcgataataaaagagtctatttaataaaaacagtgcaatagctacagcaactatgtagagacaaagcaacaaacagttctcttgatagtaattcatcttattgtgactaaatctcttgtaagaactctgtctccacttcagaaagccaaagtggattatgatttcaagtcttaaatatcactgggtttaatacacataaacccaatgttcctggtttgcagccttgtaaaataaatagatataattgcaggcagttgcatactaaaaggaggataacacttctgtattcacagagatttgtttactgatgacatgaaacatacatgaatatatcttttatgtaacattatagatacatacacacacagattctacaaactaagctggtattagacatcacagtctcaattctctccagaaaaagtaatgacgtttatgtgtttttctcgaaatcaacatgcttctgatgtttttctcattatgttcaaactcatcaagacttaagacatttcgttttcagtatatcacttggcttgcttgcgcttgcacacctaaatactttccaaatgaagactggattttaacataagataggaagaaattctttttggtgatttgccatttatttttcacaaaagacaggcaccgcaaaacagacaaacgttaaaatatgctttttactctaatttgatgaggtatgaagccctgtgactgaaattgagagaaatgaataattaagcatgtctcacttcttggtcaggtttgcacattggtatttactgtttctgctgccattttactacggcattagggagaaaggaatgccaatctctgcatcactgacattttaaacataacaatttatgctgtgcctttatttttattcagatgttaggagaacgatcataggaaatgacacaatttaatcccacagtgatttgctgtaagcctactatggtgcaaagcatttacattgaaatgttctcttcttcaatctaaaactcttcaaatgctttccattgaactgagtataaaaccctattggtctgtcattgttgaggacagtggtctctaagcatttttttctaacttgaccccaaaataattgtaaaaacctaggttctacccccacatattttaagccagtatttacattttttcactgtatagttgaaatgttctcaaaatacatagtttctgatgtatttcatcttatatatgtgatttatatattttagttaaatcagtgaaaccaaagacatgtttttcactttttaacatgtcttccttctcaaaccattcagacaaaacagacctaatttctgttaaaaaataaaatatatgatttctttaaaacacacacactttaatatgcccccctgactaagagattatttttaattcaaactctgcattatatagagaaagatgaactaatagatgagtggataaatagatagattaatggataaatgatagataaatggtgatggtttagtcacaaacttgatatgtgaacctggttatataatttattctcactcctaaattctctcaactcaaaaatgggcataatgttgacaggagttactacttagaattactaagaaaattttaaaaatccaaatttatttatgaatctcaaataattacatgcaaatgaagtaatagtaacattaataatggcagttaacttttcttaagtattaaccacattcccaagcactgtactaatcgcttttcatatacaagctcaactaatcttttcaaaagcccagcgaagtagacataaccaatctcattttacagacaagaaaattgatgctaagagaggctgtgcaattttcccagttcttacacatacttagatatgaagcggagatttaaaggtatagaatgttcataatcaggctcttgaatatttcaatattcaccagtatatgttatatctcctttatctaaattgaaaatctttaaatgcaacgaccaattctcatctatttctggcatatttcatagcacataataatgtgaaatgtgtgtgtgtcaatatttatttaccaagcatactatgctctggtaactaacagaaaaataagcaaagcaaataaataaatgttcagaaacaatgcatatatcacattattaaattggtatattacagaaaacctaactgaaatgattgtggaaaatacctgatacaccaactaagttgcacacttatgttatctttattattttattgttttgtcaagagatatttcagccccaattgcatccagcctctgtctaggtcagcattctggcagagagcagatggcatattcatagaaggtgactgtaagagtatttggagaaggtgataagtgtacaacaggcgaaggggaaggcaagggatataactgagagttagcaacagctctaagctaccagcaatgtatcaatcctaggggtaaagggtcaagaagaagaggcactgagacatctgcagctttaggagagaggcacccaaaatgagctaagacccttggaggaggaactcagccacaacatctcacatgaaatcaatagaaagggagtcaaggagctcaaagccacaagctgttcctgtcttccaagctgatgttgtcttgcactggccaaaagcaatatgaagcctgaaggcaagagacacttgtgatgcaactcctaaaagtccacggaggtaagaggctggtgaagagtggatctggaggggcaaacagagaatatccatcatagtcactgcagaaaagtgtctcttgttggcggaagcatggtttgagtgatttcagattagtggctatgcacacagaggatgtattccaggctctctgcaagaagtattacagcaatctgtaagtagagtgaatctcagggcggttcataaacacacacctacataacttgttcaggataggttatactttcttgagcttgggaatatgagaaacatattcaaggctttctttgtcttaactcttcactgagcaaaggtagcactccctaaatgacttacaggagaaccaagagtttgctagaacagagtttgctgtctatctagctacacagagtagatttaattatagaaacagccatttgattcattattaaaaccatatttttaaatgacttctgtacttttacaaagcatgaggttgaataaacctacgtagtggtttgaagaggtttaatgtgctaaaaacagtcccttttaaggggccaacgtgcttcaggatagtacttattttaaaaattgatattaaacagtgaggacctctttgttcctccatttcttttatttgtaaataaaccaattaagttttgaatcatttctggctgacattctttgattccctgtgttctttgacaaggaatgggagcaggggagaggttcagaaaaaccattacaggaacaagggctctccctgaggcagaatagaagaagaatcaatgaagatttaggcaaagagaaatattttgaatgtttttttcccagaaattgcctactctgcttctttgctcacagtctctcaggggataataagaacattctacttcatttctctatttcttcaaagagaagttttaaattttatctttgggggagatagctattggttaaataactagttctacattgtaaatttaacttgaggaatagtttcattttcccattattagaaagggctactatatgtacacacacagtctaacaaaaggtattaataaagagctaaattgtcactgagcacacatgccctttgacctttggacgtctgcatatgctgttcccctagttggagtcctttcctttttcttgaagtcagtttctaggaatgacttcttttacagatataaactcacaaacttcttaccctgcaaaagtttctttgactttctttaaccttgtcggtttttcccattacaggagttcatagaaccatgaccctctcattaataatatttgtcgtagtttagaattaaatatttatttgtgtgatcatttaattcacatccgtgtgcctttccatgagctccatgaaaacagacagtctatcctgctcattcatatgtatccagtggcctgcctatagcagatactcatgaagcttggagagccattgagtgaagtgcatttgcatacatgattttgtaacttgctgtagtgtctgttttgtgtttcagatggacatgttttcagaagaggcaccatacacactgggcaagggaagtgttatcaaaagtgttttgccatgagtcctcctgattcatggcaaaacactaacgtggtatgtggcttccgttcataccatctgagaatagatgattgatggttttatttattttcttctggagcaggatttccaaagcatctacactaaacctgcactaggtttgtgttcataatctccaacctaaaattcaacctcagcactgttggcattctgggctggttagttccctgttgtggaggctaccctgtgcattgtatgatgtctagtagcactcctgacctctaaccactaaatgccagtagcagcttccaccactcccacagtagaaacaaacagaaatgtcctcagacattgccaaatgtcccctggaagaaaaaaaaaatgactcgcagttgcatacaactgttctagaggagttccttgacagattcaaatcaatatataagtgtaatggaaagggtgctgttgaaatactagtgcaaggtttttccaatatatttcacagtagaaaagaccagttcagcatgttagtcctcattgcaaggcccactaagattattaattcaaattgttgccattcttaatggttttactcatggttaaaaaagtatcttaatctgtaatcattctgtagtaaaagttgagttttcataaatcaaataaacaaacaaaaaaatacaccagacttataacatctagaatttcactcaggttcccttcgtttttaattaagtcttttgaatttggttctcaagtaaaagtttcaagaaaaagttgagttttcacgaatcaaataaataaataaaaatataggccagacttctaacatctaaaatttcactcaggttccctttgtttttaattaagtcttttgaatttggttttgtttctctgcacataagctcactttaatattgctatacaaattaacgtacgctaaaacttgacaaatagaattggacaaggttctagaggaaatttagttgtagtaaactgaaaattttggtttaaaaattaccattgacaatacacttcttgcatttcctaggtactaggtgctcattactttaagacaatctaagaataattttgcaggtaagtagatttacctttgcttttgatagcatcctaaagtagtccttctgggtgatactattgttttgtaaataaaggtagatgaaagaaaggattagcaattatcccaatctagattatgcaagctactaagttggacaatgtgttcacaagatgcctttttccgctcttgggttacatgcaagatcaccattaatctgattctgttcataaactctgacttcaatttctacatcaataaaatggttatattagatataactaccttctactttggagtaacagtgaagatatggtatataaacctgtgtatcaaataaatgacttatgtccaataaagaatatctgaatttttaagtaaatcaataaaaccattaacatctttatttttaaaataagttttctatatatttgtttatttcttcaataaatgccaaacactgttaaaaaataatttctgtgggtagaagaaaactgattttataattatcttaaaactgcatacctttctattcttcatagcctttaataattaaatgtacatatattttgtcattatacagaaatgatttattatttaacagcattggatggacactacaaatctcagaaagaagcaatcttagaaaaaaattatgatctatattggaagcaacctaaatgaacttttcatttttctttactttcaactaattttcttaattcttgtatggcaaaaggtatacttacttaaatgatcatttaaaaataaatgaaaacagttactttgcttaaaaatgactaaagttcaaacttacagcttttgctgttgtattcctcggcccttttacacttcattttctttattgggtcatgcatttgtatgcttctaaataagttactttttttagcagacttttgagataagatacagacagaattgcagaacctgttttatttcctcaggaagaatctcagatgggagtggtgcataagaccagactgcagaacataaaatggttttctcaagtctacactagctagaaagcaatcacccttcttctttctttttatttgacccgaaaggacttgtgtactgatttacacaattctatgccatttgtgtgtgtttatgtgtatgtgtatgtgttatgcaaaaatgagtctttccacagggaattttgctgtatttccttttgactgagtatgaattatgctgtagatagatttatgaaatataatgctaatttggatggtctcatattgacttgtagggtgatactgtcctccttcaaaaggccctagagaagttcttttttcacttctgcatattacttttcagtcgaaatgtcagttgcaagcttttctcaggcagctataaaggagaatttgtacttctgcataatatctaatgtaccacattcatattaatgtttgaaagagagaaaactagagaaacctagtaaaacattgtaataataaacatgaagtagaaggaagctatcattaactcaatttgtagctcagcatggcattttacagatgtgacagaagtctttaatttgaactcaaaatagagaagtgtgagtttggaaatgaaatataccatggagttacaacgagtgtttcctttctctcagaaaaaaaggcaagaaattgaacaaaagttaaagtcatcttttcaggaacctcagacaaagatcaaaaccttaaaccaaacacgccaatgtttcaggttttgtttgcttgttcttacatcttaagcccatggtagtactctaaaatatggagtctaaagaaaggtgggcaaatttgatgttcagaacacagactgacaaacaacgtttagttatttcccttcagccttatgtaatcaatagtcccgttagataaaataggcttttctaagaggagatgattaggattacagaggagtatctgaaaggttcagaggggatagaaaagatttaagctttattactgaccagaccaagatatgcaaagtagactctaataacaaacaaaacaacaaaaacatagttaagcaagtaccaaatacaaaatcttaggaaaacaagagtacaaaaaattggaaattattatctgaacagtggggagatatatactcatatatgaaagaaggttaaggccgggcgcggtggctcatgcctataatcccagcactttgggaggccgagatgagtggatcacgaggtcaggagttcaagaccagcctggccaacgtggtgaaacgccatctctactaaatatacaaaaattagccaggcgtggtggcgggcgcctgtaatcccagctactcaggagactgaggcagagaattgcttgaacccgggaggtggacgttgcagtgagccgagatcatgccactgcactccagcctgggcaacacagtgagactggctcaaaaaaaaaaaaaagaaaaaaaagaaaaagaaggttagatggaagaagggttgtgatgaagtgatgaacagatatatatgcagttatgaagcattgagctcatgacatcatgagctttattctatggttactgtaagaaaggttaagaacaactgctctgaaacccaatcaccatggtgggtagactatactgaacacattattggtttacagatgctcctatatgaggtcaatgtgcaattcccaacctacctatcttagcatttacctgaaagacatggtatttaatcttaatgtctcaaaaaattttattctcccccgaccttttttgtttttttcaccttttagtgactcttgtcattatttaaaactatttgcaagaattttctgagtaaaacattggctctgcttccaggcgtctcatcctcttagaggtgaggtggtcttctatttaacaaggtaccttatttgggtttcttaatttcatagaaggacctcattcttaccttctaatgtttatggatctggctctaagtagaaatgcacatttaatcacaaccccccttccctctaactttctgctgctctccttcaggaaaagctcagactcaaggagcaatcattacgaatgatgatgaggtgacgtgcaagccatccatttccctagatactataaattgaagtctagatcaaaccaaactatttgacagttccataccaagatgttttgtagaagtgttcttattactacgtgatgccttgtcatagagttgtattgagcatttcataagaaacaaatgtatgaaacacaccactgatttgatcgtaggtatgctatctataacatcacattgtttccccttatcaggatcacaggataaatttcttgcatggtttttaacctgaaaaacctataatttgtttaagcaaccagaccctcccaactctgaagtttgttctgtttcccttctcaattcagccgcagatacaattttctcgtccacttttggcatcttttcagggaaacgcacctgccttaatcttgcttcaccttcacctccatcctcattaatgtattttatcagattataatatatgtatttttataagcctttaaaatatttttagaataagacaagctataaatataagaatgaataaatgaatagtaaatgacagagagggtgtgaatacataaattaaaacttcatagtctgaagggagaagaaaagctcaaatgttactttgcaaaacccagaagttgatttgaaggattacttcacatgaaacaaaaggcaggtcagccttcaggaatagtacagcaaacttagcatactctccaggaattgttcaccgattttgtctttttaagtagcatatcaataatacattccacctcactttttgcatctgatataggagtgagactatgaatctcaaagtcccaaatggtgggctgccttcctgattttttatgacgttctcaaaaagtgagtgacagataccactctttagtcttcttcccttgtatgcacatgtacttagcctaaccaaagtataacactcacttaaatatttccagttaaattaggataatacaaattgtaatggccgtagactctaattattctaaattgttaagctatataccactcgtttgtaaatgctaactttatttttttccaagagtgcttttagagatgaagacattcctgctcactcaagtaactgtaggataagttaatcagaaatacctagatcataaaaagctaaaaaaaaaaaaaaaacttgcaaggtatgtatagtttaacatatttctgttaagatttctttattgatattttccctggatgttaaaatttccctagatttgagtatttacaataataattcctctggcctcacctccgtttcacatgtgcactctctcatttaagacacatctcaaaattctctacaacgggcaccctgatttaaagaaaccacagtgattagtccagtgctttttgtactctaaagcttttatgaattttgttagttgattactacttctcattcattcaaatatagatttttaacacctttcaaattagttgtatgagaaaaacaaagttgcaagaaaacagcactgagaagaaggttaagaattgtggcttgcttactgagtctttatttcagttaagcttctggggccttagtattctcagttatgaaatgaaaaagttggactttaggatctttaaaggctctgcctcgtgttgaacactattgttgttaatttatttatgtatcttatatagttttttgtatacatataagaaattatatatatatacacatatatatttaagtctatgtgccttctacagcttgttcaaatagatttctgggtctgatttctttctctttacaatttatttatcattattattccaagaagagtatactgtttaggctaagctaataatggacaattatttataacagttttgttgtgttttctatgaaattatgtttttccctaaggaattttatttgtgatatcatactgcctattttctcacaaatgtcccacagatgtagcaaatcatcaatccttcgaggttaattggagcctggatgatagcatgtgttccctgttgttcaatctgaccgagaggaatattctcatgagaagcagaacagatatttcaaactcagttgtatgtagcctcagaacatcctaaaagcataacaaattggcatggtctgtgtgggcctgatgcctccccgctccacaccaccagcactcacagacattgccttgcccagttattcgaaatgcaataataactttatgtatgatttgtctccaggtagaataggtaaaagacagagaaaaatgcaaattggaatcttattatataaatatgaatttatctatgaatacacgtatattatatatgatatgtaatatatgttgtactgtgtgtaatgatatatatgtaatatataaactaaaggataattataataaataatacacaactatatatgtatttgtatatagttatatgtgaatttatgtatactatgtagtatatgttttatattcagtattttgggctgtagtgtgtataatatatgcaataaatatgcttaataatatgtatatgcaatgcttataatatatatataaattgaaaaatctgtaataaatgcagccatatacacacttattatattatatattatttatacaaatatataaaatatgggttgggcatggtggctcacacctgtaatcccagcactttgggaggccaaggcaggtggatcatgaggtcaggagatcgagaccaccctggccaacatggtgaaaccccgtctctactaaaaatacaaaaattagccaggcgtggtggcatgtgcctgtagtcccagctacttaggatgctgaggcaggagaatcacttgaacccgggaggtggaggttgcagtgagccaagatcgcaccactgcactccagcctgggcgacagagcaagactccgtctcaaaaaaaacaaaaacaaacaaacaaacaaaaatatacatatacacacacatatacatatatatacacacatatacatatatacatatatatacgacatagagagaaagagacagagacactagtcctaaatcctaggccacagttgttcaaccttttggcttccctgggccacactggaagacgatgaattgtcttgggccatacataaaatacattaacactaaggagagttgatgagctaagaaaaaagtttgggcataattttcatatctgccaccacagataagcaaaaacatcctcacattcaaagggttggacatccatgtcctaggctttctgttgcaaagccgaaaactgaaatttaaaaagtttattgtttttgttgcttctttcgttgctgctttaatttttaaaagcattgctttaaataccacagcagtatttacagcttgaacctgagggctgagatagacatgtgataatacaagaactcagctccatctttcttccccttcgagttgggaaacctggagtcatggtaggaggacaataaaatcccttagatctggagaaaacctgtgcccacaggcaggtgggtctctgggagtggaggaccatagtgtacaattggccattcaaagtgccaccaggaaagccaagatgaaggcaggatatacttagacagaaagagcctgagataaccagcaggacttgaaggtcacttggagtgggtgttgctgtgtgagccacaaattccaccccaaagaggcgctgggtaagcaccagctaagtgagagaccagatggaaaatgcgctgagtcttgaaggatgagcagcagcagagtgagccacatggggctgctcagtcagggatttgggcagtgaatgcagtgcattagaggctgatacccaggacctagtggaacaagctacaccccagtggacgtcctggaggaatgacagcaaatgcctctcctttcatgtcttttatctctgtagggagaagagagaaaatagattcaaaataatttacatttgaaatagaaagcgaggaaactcccactggggccacatcaaggtcctcactttgatgtgtgccagttaacattaattacagggaaacaaacaaagttccacacactggatgctgtggctataaatgttaaatgtaatacagctgcacatcttcatgcagcatatcagttcatcccaatgacaataaaataaagcagatactgcagaggggattacagatatggagatcagcagacgcacccattacctgctcaccactcactagtctccgataaagggttggatttactaggaggttatgtgacatggccaagctaagaaccaccggaagtggaagtactctcattccagtgcacttttcactatggcaatctgcaggcaaatgtctgctttaataatcgagaatctacaaaatcttatccttaactaatcgttgttaaactggacaaaacacattaatgggaataaaagtgaaaaaaaactttcacccacaattctaccatcttaacaaaaccaataaacttcccttttccacatgaactaactgaaagttatcatgtataagcaagaatgaactgtataaattcccaatccaaagtatgtaaaaccatacactatggtctatattattttgtgtgcattttttgcttatttcttcttacggatcatatttaatgaatgctttatttcttaagtaacctcacctcagttagaatggttagaatggctattatcaaaaaagacaagaaaagaaaattaacaaatgctggcgaggatgtggtgaaaaggcaactcttacatgctgttggcaggaatgtaaattagtacaatcattatggaaaacagtatgtaggttgcttaaaaaactaaaaataaaattatcatatgctccagcaatcacacttctaggtatatatccaagggaattgaaataagcatgttgaagagatatctgcacttcagttcattgccacgttatccacagtagccaagatgcagagtcaacctaagtgtccatcagcggatgaatggataaagaaaatgtggtaaatatacacaatggaatactattcagccacaaaacagaatgaaatcctgtcatttgctgcaacatgaataaacctggatgacattatactgttattttcttaaccattctctcctgttgaacatttagatgattcacaatcatttataaaggttcttgccaactcagtggacatgcatggaaacagccttagggttcagatttttcctaagaacaaaaggaacagcgctacccagaattcaaaaggcaaatattgcctttagatttgaagaatggctctatctcattaatccatttttaggagaaaaagtacagtaacatctcatacagtataaacacagccagttcatcagaatgcaacatctgtttacggattactaaagtatgtaatccaacattttagaagtttaaaatttaggaaaaaagaaaacctttaaaagttatgattgagtcctcacaatgaaagaaagtaagaacacttgatttttaccatcctttccccaatctgcattatgaagtgtttttttccccctctgggaattaagtattgatttttaaaggcatatttagacaattttgctaagaaaagtaatctgtgaaaatagtttcctgtgacttttcatttaaagacatcagcacttaaagcatctgacagaatgttacaatgcttgcatcaatattcaacggtaaattatatttaagtacaaaaagtataatagttgaagaccaagatgctaatggataggaacaactaatgtctgattttctacaaactccttgcagaattctaaagaagacgtatgaccatcagattagcaactgttatataaagcttatttcttcaatgattttttcaacattaaatattgttgtctttaaggacactcttagaaaaccctccatgtagcatgttgtatggaatgaacgagactttttcctttttgtttcccttgatacagttgcagatctttatgtactgcagagtaggtagaaacagtaacagaagaaaccttgacatgggttgaatctttttaaaatatagactttatttcttagcacagctttaggtttacagaaaaactgagaatacagtaccaagttcacatgtactccacatcttctttctcctgaaattattacgttagtatggtacagcgttaaaattaataaaccagtattaatgaattattattaagtaaagtcagtctttattcagagtccttggtttttacctaatgtcattttcttgttgctgtttcgggattgcattcaggatagcacattacatttttctcactaatcttcttaggcttatcttggttgtgacagtttttcagattttccttgtttttcatgactttggtggttttggtcaatattggtcagctattttgcagaatgctactctgttggaatttgtctgatattttctcattagtagagtagggctctaggctttggggaggaagaccagataggtaacataccctttgcatcacctgttatcaagcgtgaatactagcagcataatctaccactgctgatgctaacctggatcccctggctcttctgctgagcagatttgcctattctccctacttatttatttaatcatttatctatatcagtatgcactcatgggagcatttctttactttccagcactataagatcctccagaatcatcttatgtatctcccttcccagcaccagaataatatatattttttctgaggagctctaggtgccaggagtgttcattgttactggggtatcattgttcctaagccctctcagcagacagagcaaggaaatacatgtgtgtgtgtaccaacccatgtataggttgagttttaatcaatcattagataaaataggtgttttgccttaagattgtctgtgctctttgactcgtttggtgtaaaaaataatatgttttaatatttttttgaatttttaaagggaaatagtaagttgtagtgaactcttagtctccaaattgatgataactgatggtaataataacaattaaccattggatttttgttaaatgaaaacacacaggcataattctaatataaaaatctgcattatcacacttctcttgaaacattaataagtagaaattttcaatacagttgataggctgttgtatgattgctttattttgtatgtttgctttgccaggatactagtaaactggcaactaatcaaaagacacaacatggcctaatctttcaaatttaactgctctacttgacaaatgtgccaaataatatttttaaaagctaaaagaaaatcttttcaagctgtggaaggtgtttctatgagattaatttgtggccagtagtttacttattatttagtcaatatcattgcttgttaatttcaatttgtgactaatcttaccttagatttcattatgtactttagaagattcctaagtttttaataagaaaaaagtaaaatattgtccaagtaacttgggaaagttattctaaagagtttaatgttttcagtagttcataactgagattataaattaaatatttttacttctttcctttttaaaaattttcctctccaagattaactatttttctaattactttattatttcaaacaattaatttaattattttaaataaattacttggaaaaatagtgacagtgctgtataataagtagggagtttccaatttgatacaacttgatctcagtagtaaatcaagataacaaattaatacagttgatttagttggaatacattccttttaatttggatgcttttgtgttgccatgaaaatttgtcatttaaaaaatcagataagcattttaaaataaagaataggttaaattgtaaatatagacctttaatttaccacaaattacattcctggaaaagatattttaagtctaatatgaattttcaatttaaaacaatgttaaaaagcaagtctagtgtaaaaaaaaaaacgagaaaaagaaaagtaaaatggctccagatcaaattttatgctaataaaatggtaaacctttagaatagattatgtggttttaagaatattttctaaataaaagagggcaataagtattaaacatctaagtataccttttttaaagaaaaaatatttattaagcatgcaaaatatctgccaccatactaagtgtttttttttattaatttgtatttttatgttaagttccgggtacatgggcagtatgtgcaggtttttacataggtaaccgtgtgtcatggtaatcttaaacctttaagaaaatgttctgaaattgggaatggcagactctggcttagaatgaagcagctgcaggatgtatggtcatgtgactttggatgtgtgtgctgaaattgcagtggtgttactggcccatgttgcctcaagtgtgctctggggagcatgagttgagtgggacattaatagctacgattcaaataagggtcttccaataattaaaatgtgaaagacactgggttagacaaaagaaacagagtgtttgtttgtttgttttgctgcagaatttcaaaaagcctttactatacaaacgtgcctcatgaatcttcaagtaagaacatttccccatgcttacttgctcaaataggtaattgtggagcacaaaactctcaccctgttcattaacatagagagagagagagagggagagagttatcttcctcaagactgaaggtatgccatgcattttacatgtgatatatttcatccttatgataaactataaatttgttattattattttctcttctatagataacaaaatggagggtaacaaattaaataatcttctcagtttcagtcaattagaaaaaggcagctggaaatatgaatccccttctccctgaagtcctccgttactctttcttctagtctaaataccttttggaaaattttagaacataaataatatatcctatgacatatggataattatcagtgaaacaacaaaacagaattgagatctccactactctttcctctagtctaaatagcttttggaaaattttagaatatttcctatgttatatggataattatcagtgaaacaacgaaagaggattgagagattaccaccaccgccatctccatcaatccttcctctaaacccatcccagttaattgtacactctaacaacaaacagtgtgtttgctaggcataggtaggtagtgaggcttcctctccaacttgattgcattatttgaaccctttcaaaagagaaattctggagagtccactgataatatcagtttttctctttgctagttgcctcacatataaatcacactcacttttaagtaatttagttaccctggataaccaagagcaagaggtaatttcttatattcgatttccacttagtacacacagtgaaaggggaaagatctgctcatttgcagaaacatgttaacgttagtcaggcactcccttttatgtaacactatcagatgctttctctctagatttttccagcgcccactggagttttcaagttcatgttaggacaaatacagtgtatactaagctgaaatcaaatataagagaaatgaactcttgcttttagttattccaggtaactaaattactgaaagtaagtgttatttattgtttgaacacacacttatactgtgtgtacttggcatacataagtccatatacaatatggcataatttaatggaaggagctcaaaacctgagaccagaatagctagtttcaatttctggtatttctaccagtaataactgaacttacgcaaagtcactatctcaatgaaaaccagagatcacaaaccttacaagaaaagtagctgaagttgaggtctatgtaatgttaacattaggcccataaaatcaatattaaatgcaaagatgaatgacacaggtaaaattgttaagggaaaagatctgctcattctcagcaacatgttaatattagtcaggcactcccttttatatcacactatcagataccttctctttagactttcccagcacccattggagttttcaagttcatgttaggaccaacatgattttgaagacacaggtgcctctctcagtgactctacctccagccacagaggtcttcctaaacacaggcaactctcctctgagtttcttccaggtttggcatcatgcaccactctccacactctatgcacttggaagctagaacctattccaagttgactatgcaactgatgtaatagatcagtggcagaacattaactaaaaactcttcaagaatagtatttgaaaaaaattttaatgtgtccacgtggaaaatctgatgaaaaacatcagcagtatagattgcaattgccagaatgcaaacctcaaggggcagatgctgtccattttattcactgttgtacatcctgcaattttctaagtgtgtctggctcatgctagggaagtaagaactcaaataatatttgttgaatgaagaatgaatattaaaatgatgaaaaaactaagtgcctaaaaataaagtcatgggtctgtacacacttatgtaaaaatatgaacaactaaaaacattacttggaactttggggatctttgggttaaaatatccaaaatgatgctccagccaaggtaatgattggcataaaataaatttggacctctctcaaggaaataaaagcatgtgaacaatgatattgtcactatagatttccacactattcatataaatctccataatatttctatttatgtgatgtacttaactacataatagtaccatatttatttggtggttttttggcaaattacagaaattagtgtatttcatcttcccttgtgaaacaggaaaggctgatatgattactgctagttcacagatgaagagatttaggcttaaagatattaaaggtcttataaagatacaccaatcaactgttaagaccctgtttaggaagaaaatgtaaataataaaaaaagtagtaaaaacaacataacaataataataataaaacaaatgtatccagatattactcaaagccctttcatattgagctcttaccaatgacactgtgaggtttgcaatagttttaattcaatttatcagatgcaacagcaatggcctggtaagactaaataaccctcactcactcattgatgtatctagtaaatcacggacgtgggaatcaaacctatgctttctgacaccaaaacatgcttcggaaagcctggctgcccactgctcaattcttaatcctattttcaccatgacctctataattgtatgtgttgagatgatgcacacaaatatattatctgtctttctgcaatccttattataaatattacacatctgtcctaaaattgcatatgcacttggaatatttttttaattaatggtggtgggccacgtctactaagtttacctagatcctgttctaaccattagttataagtcagccacccaattaaggaagatatttgtgattgtgaagctcacagaccaactaattacatatgtcaactaactggttgttgatatacactggtgtatacagagaggcaggaatgactccagcagctccacacaattcccagcaaccagctatatttctcttctatgcaagctgctgggaaacttcttgagtgcagtaataatgttaagggcaccactatcctaccgaccttctctgtctcttaactgttgcataagattataaactttccaacagacattcacagtgtatgctcaaatcacgtgtctatgtgaactcaataccctctcaaatattcagtatgcatgaattttatcttagcttttatccttttctccaaagctgaagcttaagcagacactttgacaagaaaagtagaccagtaattaattcattcaagcatttgagtgccttctctatatgaggacccagtactaagtgcctagcgattttgctatactttactttgaatattttaagtcactaaaaaacatgccagttaataatctagagaccctttttattggttggttgattgtttagttgatcggtcggttgcttggatgggtgatggtttgttggaaagaagaatgggacaggatataataaagaatacaactcccctttctttttccttacacacactcatacacacacacataaactttggcttagtccccaacccctttttgttaattttttgtattcaatattgcacttgactgacacaagaaagtcactgtagagaaacaggtttcctctgaggtaaagctggtttccacagtgtgctaaactgctcatttaaaagcgtgcattggtccttaggtgcatacggggcaacagtgctcatgtcagccacaggacactccaggccagaaggagtaacacatttgtactgcacataaacaacaccaggccatgccatgccattttattttatgcattttggctcccatttagaaaaaagaaaacctcattatcttgttgcatatatttgtaaggtcagtgaatcatgttgtttgttttcaccttgaaaactacttttacgtagatgattgtgattgcttggagcttagaaaaatactgagatctgtgaacaaatatgtcttaaagcatccttttcccttctcctcctgagttcctttagatgtgggggatataggaaaggaaaatgctaccttatatttgttatacagggatgaggaacattggctagcacagccatttctagcatccctagatttgtctctttcaaaaggtaaaagacacaagcaaaaccccaattaagttaataagtattggaaattataacacacacgctcattagttactttgtattgttcagaatattttttttttttgaccagggtgagtagagttgattgcattcccaaaaacccaggatgttaaacctagaacttatctcagataaaggatatttcagttatgtatagtagtaagtttttttttaaaaaaataaatactttgaaactattttagaaaagactctatccaatacaatgcacattaaaattacccatagtctagaaaaaacatgtgtgtagtaaaagttagtatttgatatctgcagctcaaagtagcacatttctatttttcttttagtgggcatgttcagtgattaaaaaataaaacctagtatgttctgaatttttgtaaaggggctgactaattgtaggtcagagctagtatagtaactgagcaatttcaactgctcaggaagcgtcactatgccagtgtctggcactgctcctggcatattctgttagttcctggaaagggggagttagaagtcctcagagatcagggcttcactcttgcggttgaaagtggaagatgggagaaactaagagacccatgtgatgtcacagcttctcctgtggctccctctgtgaccgtgactctaagaagcccgatgggttgggaaaggaggagggcaaatgagattcagcgaacaataactgggtttagtttaaaaggcgaagagctgtgtcaaccctcaaagttcagaaattgccctatgcagccacagaccaaaccttggtggtgggtgctatacacttatggctgtcagtccacgccccttccactgtccttgcgttttgtcatctttgggctgcccacattcagctttccggtgtcttttttatctcattcgagatcagagccctgaatctcctaggaagctacctggactgggaactggatcttgctcagtggcaggcaagcgggcaaattagggagcaagtgggaaacttaagtgtctgctgatgttgctaactgaccgtccttctcactcttcgaatcttcagctcgaagtcagatctgaactctgccccaatctagtggaacccgtcagagttggcagactccatgtggaagaatccaacttaggcataaaaacttggaggctctggggtaacaggctctaggatattcccacatccctagtggtccctgtattgtattcttgagattcgtgcatacttgccagtgcccagagcccaggttgccaggcaccgggactgcggatctggactgccagacgcccacccaggaggctgggagagctcatttctgcgcccaactcaagtggctgcagcggctcgcgatcccttgcccagagtaggggtgccggtccctgcgaacctggatccccgcactctagcccgcgttcctggagcccagattgaaaaacccgccaactgtacctcccggggaaggccggcaccctccaggagggaagcagtgacgcggctcccccttttttgtgtagcctcccatgagcactgacctccaccttccccagctccggctcctgcgccgccgcgcgctgcctcgcccgggacccgctacacccgcgttggtgcggcgaccgaccacgtctcccgagcaggcagcctggggctcactcaccgatcctgagtacttgcggggcggtctgagggaggatatagcagaggaaatagaggagtgcccagctggtgtccctggtccagagcccgggctgggcgaggagtgtgccgtgctccatcttcctagcttcttaattcatgccgagatacagccgctgccggacgcccgagagatgcacccaacttgggccgggtccccgcctcatcctctctggatgctccggttccaagcacgctgcgcgctccccacggagcgagctcgagggaacccgcgtgggaccgcggagctggctggcaaggctgagctctctcggggctcctcagtgctgtcgctagcccatcacggctcctcctcctcctcttccatgggccgcagaccgcggaggatcagcgctctctggctcccggagcccagagaccagctgaggaaagttgctgccccgatctgcaggaacgtctccctcattcgtcctttggtcagatgcaaaagtcgggggataggcacagacagaggagggaaaagggggaaagaagactaacgaagaaggagagagggtacagggtgagttggtgcaggggctctgagcaagcctgatgagctccagcaggttaactgggagcggagccacgttccggcttctctgaatctttgctttcctcctcccctcgctggccccaccctttatttactgcccgccccaaccccactgatcaagatactcgcgcgcgcgcgcgcacacacacacacagacacacagacacacacacagacacacacacacacacacacgctcttttttctctccctcaactttgcgctctgctgctgggaagtcgatcgagtgttgcattctcaagacagatcaaatctaaactattggtccgagcagagaaagcctctgctgtccgctgtgagtggcaaggaagccttcttggtaatgtccgtgtgcacctgttagggggtcttatagacagccagctatgactcgtcccatcatttaatggaaaatcacctccaatattttggaaaataccggggctcctgttttgactctgacgaggatgatgaacaggggaagggggagaggaatgagaaagcttcagtactccaagattatagtggcttcattcctatttggacccaagataatctcttgcaaattgcttccatttacacatgccactgagatagaagcagcctccagcgccgctacttttcttcatttcttttaactgtcaggtctgaatactgaaagataggctattttagcaatgtaggtttggagactgtttctctgtagaaggacaaggacacttccctagggaaatcagcatttgattatgttggattaatttccttcgagttttgtggggaatgttctatatatatgtttgctaggtctatattaacatctcttttttttaactggtaaatagattttgaagaactgaccaaatccatatgaaaagtatgtccacagttgttatatgagcctagagtgggaaacaattgcaaaaggaatctaatatatcttaaagtccattcgtgtattaattaattaattcattcattattcaacaaatacctactgagtattttgtttgtggtgtcagacactatacttttcactaaaaaccctatggtggggaaaatgcatgttcattctccaagggaggttagaactccactgtggaaagctagtcagttcatatctcaagtagtaggcttggttctggacactttgggatgagagttaacaaagcagaacatgtctgcagataagaagagggactgatagggatttaggaatgcatttttgcgtggaaagattgaggaaaccaagaggaattaggagcacatgctggttatcttcagacatttgaagaattcttgtgttaaaagaaagtagccttattcagtgttagatatgtgagaagagctaagaaaaataagattgtcagagggaaattgtagaagagtaaattttgtctcattcggggagcatttttaagaccagagaatatcaaacagcggcaaggctgggtgtgctggcttacattggagcactttggtgatgttgaggagggaagatgacctaaaaccaggagttcgaggccagccttggaaacatagcgagacccttcctgtgcaaataaaaattaagaaaaacagtagcatgacctgcttcagaaaagaggcaaagtcaaactattcatttatttatgcatattttttgagagcccacgttgtgtgaggtattgtgccaatctctggagacacagagggatatgattgctgccactctggaactcattggcattaaagtatgatgagctttacaaaatggtgttatggaagtaaagaaaaaaagtagtgtaatcccatttaagagtttggaaaggggttcttcaggaagtgatgcttcaaaactcaaagaatcagtggtttaaaagggattagtaagtatttcttaaagtgagaatgaatgtaaatctgttagagggtttatttttaaacctaaaggtctgtggtaagcatttttagtcatctattttctctgggtacatcaaagaccaatacatagcagatagtgagtggctaaagtttgaagacccaaggtctagaattaagtcagcttttgaacaaactgggtttaaattctggttttaccaagtctatgtttttagctttggttaaatttttatgtctgcctgtagtccattgctggtgcttacgtatatctagttttccctttctctggctcatgaaagcctgtaccttttcaattagttggaatctaccttttcaattagttggaatcatgtgaccatttttggccaataaaatatgagtggaagtgcactgctgccaggagaaaaggaagacagtgaaaaaagatcctgcatgacttccaggactctctttccctgccagagtaactctgaaagccacaagttctagaggttaagatgaaagcagcctcaatccctgagtaattttttgtaagggagttgctctgaatgtttctagaacagcaacacactgctaacaaatcagtcccagctcaacattatgttttaatccactacaattttgagatatttgttactgcagcataagcttctctatactaactaataaactttctatgacttgatatcttcatctgtaaaatgaggataataataacactacagggccattggaggattatatgagctactgcatgtgaagaatttcccaaggtccttgttactcagcatattttagtttatttgtggtcattacttttctggttaaaggaatccatgcatatatttctagtaataatctgccccagattgcagagactgaaatattttgttttttgggcaagaagtcaacaacactggtccaattaattatatggtaatcataattgttctgatactatttcaggagttttgctactttttacctgtattgtctctggtttatgaggaaacagttcattttgataattagagatattagagagatttcctaaaggaagtttctcgaaaactaaatggcacactgcagttatgtttctgtatcatctgtaaaattctgtaaagcttaaaactgaaatttatttccttgttaaaatgcttctctccactgctcatgtacacaggctcatggtgttgagttactcatgagtgatcagcagctgctgttaatttgttttgtgctttttagaaggactgtattttgtacatatattcatccagttattttttgcccgaaatgactctggtaatcactcttgattcacattttctcatagtgccctcttaagaataaacatgtctaattgaatgcatgccgtctttttcccattccccaaatcttaagcttaaattgatacaccgtggttaacaataaaacagtacaatgacatgcagcattgtgcttcctatgagagctggtggcattacttagatactaatccattttaaattacttaatttttaggagataacagatacaaagaaaaatagcttagagtaacctggggaatgcgaatgttatacagtcttttcaaaatgttgtgagcatagttgaggaaacttaaaatgttactcatggcaccaaaaacaaaagatcaagtggcttttagagcctgctgggactgtgtagctgatgtagggtctaaatcttgagttcttgactacttctttatgcttttttcgctaggtcatatcatatatttctatgatgttaaatactaccttttagccaaagattcccaaatgttgtcttttgctcaaacctcccgattcatgcagccaattttagtgaccatttctaagtgagccaacatctcaaatccttgattctgtcccatgtcattgtcccgcactgaatcctctcccaaattttcttatttcaatatgaacaccaccttccacccagccattaaaactggaaaatcaggaggtcacccttcatttttttccttacttcttcacctactcccgtatcagtttatttttataatggctttacctccagagtatgtctttagtcagcttctctatactccactgatatcatactagcctggggtttctcaacctcaaaactattgatattttcggttagaaaattattttttatgaaggcagttgtccggttctttgtaggacttttagccacttcccagggctctctccactagatgtcagcagtatcctcctcccaaggtgggacaacaaaaatgtctgcagacattgtcaaataaatgccctccgatgtacaaaattacccctgattgagagccacggcactagcctaaatcaccatgatcttccatcttccatctggtctattacaataaactcttaattgtctctcttctctcatttgcctctttctatccattctgtctgtttgatctaaattagctcctcccactggctttcttcacaaggcccttcttagatccctcctggtcattattaactctctacttgttttatttattttattacaaattctctgagagtggactctttgtctgttctgtttgcttgaaaccttagtgtgtaacactgtgcctggtgcttagagggagcttgattactactcactgaatgaataaatgaatgagtgatgctctctcataagatgtacaacctataaattatagcagcagatttgtaagattgagttgaataaggagactaatttctcttttaatttcattcaaagcacctacattgatcagcttaatgtttagtgttatcctgagttcatgtctaggaaaaccagagtataacactacatgtgcttcttcagatttcagcaaaatgctatatggagtaggggtttcttttataatttcattttcagcaaagtggctatcattacacataccttaacaattttactgtaatttctgtactaacactggtctatctgccaaagcactgtggaaagcagctgtagtgaaatcttaaaaaaaaaaaaaaaaaaaaaaaaaaaacaaaagaaaacctatctctgttatttatcccttcacatcctattgtaataacctgagactctaaagaaattcagtcacatggagggtctgaacctagttggtatttagctaatttcatacatatgttggactcatcacaggctaaagaaggaaagatccaggctgagtactcagggtattgggagccagccctgggctgaccactgactacagctcactgctcttggagaagtcacatcacctcctcggactttaactgcctcaaccatagcatgaagtggttagactcatattctccacttcctgttccagacctaagagtcaatataaattgtagaaattttgtaaaaggatggctcatatttttgctctcctttgtttataaatagaatgagcttttccttaagataatgagcatctatttgtatttattttatatgccagacgctgttcttcatatttttacaggcgttaacttacctaatacagcaaccttaagaggtaagtactactgttatgcacatatcacagctaaagaaactgaggcagagaggtgaagcagatgtcagaaatgatagagctgagtgacagaattagagctgggtcactatggttctaaagccccagctttttaaaaaacaaattgagattaaatccacataacatgcaattaaccttttcaaaacaaacaatttaattccatttagtacatttacaatgtagcaaaaccaccaactccagttaattctcctgtggttggaaagtcatgagtgacacaggagtagcaaaggtgaaattagagaggcagcaggtgcatgcatctgctaaggacttgtgggctggcataaggactgacttttcttctggatgaaatgggagtcactgaaagctttgaatagagaagtgacagcatgaagtttatgttttaatttgttatcgtttgtttcagggactacattagttatcagaggcccagccaataggtattgttcttgccttcatggggcttatgatcatgtaaatagtcctgcaaataggccgggcatggtggctcatgcctggtgggtggatcgcttgaggtcaggagtttgagactagcctggccaacatagtgaaaccctgtctctactaaaaatacaaaaattacctgggcgtggtggcacgtgcctggtaatcccagttactccggaagctgaggcaggagaattgcttgaacccaggaggtggaggttgcagtaagccaagatcgcgccactgcactctggcctgtgtgacagagcaaagctctgtctcaaaaataaaaagcctgttttgagacttagcgtgaatatattcttttgggcctagcttccttcaaataatagctaatgtttacagagcccttactatataccaggcactacttttagtgccctgcagtcccaagtccccatgaccctttgagatggttactcatattagttcttctcttttacaaaaaaaggacactgaggcacagggacagaatgtagtttccatgaagaaaagctaatagatgtgagaagagattttgaaagtggaacttggcttctattaggagctcaggaaagactgctcagaggaaggaagctttacacattgccttaaagggaacttgggagtgactgcaagggggacgagaagaacattccaggcagagagaaggctctattacagaaagcagttcccagtgatagaaaaggtcttaaagcgtatttggctgctgtgagctggagagactgtagcaccagatgagatgggaaacgtgggcagattctaggtccctagggatccttacaggcctccctgaggattttagaatttcttctaaaactgatgtaaaaccttggagccagatgcatcttttccacctgtactcatttgccatcattcatccacccagttacatgcttcacaaggaggagttccccaccagcctgggccacaataccagcttctccttgcttttgcttctggtgttcctccccactctacttctccagaattcttccttctcattcggcttcagggccaccggtcctcttctgttccccagtcatgcccaactcctcatgacagcacatttccctaaaccgctctcagtccttaagcatcctttttctcacaggttacctggttaaggattatttattcctgagtatctcatttctcagagaggcattccttgggtccacagtgaaaaataagtcaacccagtttattccttcttggcatgctgtacttttcctcctcaccacttatctttaatgttaactatttattcgtttgtttaatgtttctctctctcctttagatttcaagaaccaggagagcggggtttgtgcgtgcatacgatgctgtggctctgtgcacgtccagagccactcccgacttctgacacatagtaggaactcaattcgtattggcagactgattagatctgaatgcttagaatgtcaagaattccgtaagctataacaaagaaatctcagttcaggcagggaggtataacatggtacgtctcctgtgtttcactaatgtagtcaatgtttgatgaaagtttgcttttacatagtgtttcattaatcattattttcagcaatcttataagctcaaattatttcagggaatgattaaataaatgcacagaaaacttaaagttagagagctagaaattgcctttaaaaagctaaaattgaagctcacaaccgttacgacgctctaatttttattcagcctacccttccttatggaatttcaatttaaggctcctgacaacaaaacacattaaaccccttcatatttaaatcatgtaaattagccaaatttctaattattacatctggtttaatttctctcctcgtaatctcatacagcaaatgtcatctgttttttaaattattatattttatttatcaaagcaatacatgcatatcattttaaaagttaaatagtactaaataaaaacatactgaagcagtaccacttctccctcttcctccagctcctgctctccaattctttcagctattttgtccactatttatgcatcttatatttctgtttctccgtcgtatacataaatagtgtttgtcgacttcatcaatttgaggtattatctactgacttccattatgtcaatagataatattgacatgattttactctttaacaccttcatctgattaaattgattttctctttctcctctttttttttttttgagagagggtctcactctgtcacccaggctacagtgtagtggcacaatcattgttcactgcagcctggacctccggggctgaagtgatcctccctcctcggccccctgagtagctgggactacaggtacataatgctatgcctggctaatttttatattcttatggagatggggtttcaccatgttgcccaggctggtcttgaatgcctgggatcaaatgatcctcccacttcagcctcccaaagtgctcggactataggcatgaactaccacgcccagtctctcctctttttaaaatactacaattttaggttcaatcactgttcagggtttatagtttactttgctgtcctatccccatctccccactcttgttcttgtctccttctttttctccttcttctccctcttctactccttctcctccttctttttgcctccatgtctctctgtctttatttctatctctatctctctccttctctcagaacatgcttgagtaacgtcctgagtaaaggtgcttaaaatagctctctttaaaattcaatttattccggtgttgtatgtattgcgttaattcctctctttgtcaacttgtataactttctggaatattttctcaactttattgttcaattcttttatgatttttttcatttatgctcttgtgtttttgatttatttttcatctgactttttaatgtgttatttttgttttatagatgcaacattattttttaactctctaaggatattattgggagacttttcctccaaatagtctcttgcttttaagttcctttttttttccatgtattttagtctccaactttcaaggtgaaaaacttccttaaatgtcctttaaccctttgttgtgtgctcatgtttaaggaaagggaactggaatgtggattgtaagatctgaatgcaataagcaggacttagggggttctaaggttttctaaagagggacctggagtgacatcaggaaaactccgatgtcagtatatatgtgtttgagagtatgtttaagagttttttcttgggctgattatattcccaagagaagattcttctggtgccctctgggagtcgagtgaaagaaaagagctggcaaacatcaactccatgagactatggcccctgtttcatgtgaaagttatagggagaggatgttatccagtagcgtgaagtcaattgtgtcctaaagagctttccagcaagccctttcatactagttctctgtttgctgcaggtcctgatgtgatccaggcttctagttctgagcaatgagttttctactctgaagattagcttgattcttgcctttcggcagtactactttaagatatagaattcttcagttggccaagaaagtttccacttctctgattatcttcccattccttgtactttaattgtcatttttgtgagatttctgggggaaaagtgttcaatcctccacctttatccagaagcacttattttataacttttaatataaattgttatagcaagacaagcatgatggcttacacctatagtcccaactacctgggaggctgaagtgggaggatcactagcagttgggagattgagaccagcctggcatcatagtgagacttctctaaaaaaaatttttttttaattagccatgcatggtggtgcctgcctgtagtccgagctacctgggagactgaggtgaaagaatcattacaggtcaggcatttgagacaagcctaggcagagactccatctctaaaaaaaatgtttttaataacttagccatgagtagtggtgcatgcctttagtcccagccactcaggaggctgaggcaggaggattgcttgagtccaggagtctgaggttgcagtgagctatgagggtgacagaatgagatcctatctctttaaaaataaataaattaattaaattttaaaataaatacattgctttagcagatgctctcaatgccccatccatatgttctcagcagtttccactatatgtgaacatggcctcctgaatacagctgggactttctgcctaaggactcttttctttctttcttccctgcctccctctttccctccttccttccctccctccctccttccctccctccctccttccctccctcccttcctccttctttccttccttccttccttccctccttccctcttccccccatccttccttcctttctttttgactatggaagtttgcgtttagtgctagagagtcaatgtcactggaagtaatacccattgggaaaactccaaggtatgttctatactttttccggtttcccaaagggattcagttccagttgcctgagtgatcacttgcttgtcggtgcatctttattggcttcctctccttccttgtcccatatccttactcctctactattctttcctggaattgtctctcaaattaactaacaacactcaaatcctcgtctgcgtgtctgcttctgaggagaccctagatatttctcaacctttttatacttttcacctacactgttctttttttagctagctcataattgttagataattacaatttttgaagactgggtaattaatcttattcttaatgtcctggtcacagcaacgtaggtcacaagaattgcatttgataatctctttctttaaggcaaactgtttcctactttacgaatttaatgtatctccttctttaagaagtaaggcatattataagatatcacttgattaaagtggcctgagttttcccatggccagtaaattttaaaagtatctccaaatctgtgtactaattgcctgtgaataggtgagtaggtgacctcagtcattaaaaaataaaaacaaaaaaacccactgaatcccaagtgtttaaaaatggaaatgcattacttctgtgcagctcagacatttggggcaaatgaactgatctccaaaagcttgctacataatgagaagaaaacaagtaagagcccggttaggtggatatttattccagggcaaggtaaacaaatttccttccaccacagtaaaattattgagctgaaaattcacacaggaaaccagaccagtttatcaactgactctctatctttttaaatcctaaaaaagacaatcttttgtaaaatattattacaaagtacctgtattctgtaaaatgacttgacaatcttagagtaatattgatttttttctcattgaatagttctacaataatcaatgagaacagtttttcccctcacagcagtagacattatcaatgttttaactctctctgtttttcttctgtaacaaccataataggcaatttaaaacattgaagctgccttctttccagtggccaattcattgcattatttgtctctcttttttatattctcaacataaaacaacttttttttattgtgtcctctacccgactgccacagacatttggaaccatatgctcctatctggtgcacaccatggaagagtaaagaatgttaaaatgtggcttacagtctccagcaatgccacagaaaatcctccatgacatgctgtcatacccaagacagcagtaaagatggaaatctagccagctgtaggcaaaggagtatctgagtacgtactctggccccaactttggtctctgaaagtcaccttgataatgtcacttacatttctgcctgtggctacagaatcagagcagctcctctttatagccttatatagttatgccagtattaagaataaaataattgaaacaagatatagatccagatacatgtgactttacccttttgctcagccccctaccacaaatgatataaaatctgagagataagatctgtgttatatcatcacaagccttaaccagcagccaagacaatttttgaaatagattacacttttgctagttgatgtgagaggaaactgagtgactaagagacttcaatatttttgttgtaagtcacaaagcagatttactctgctcccttcaccaactgtgctatgctggttcccaacttagagttttatttatcaatctgtgcatttaccaaatgttccttccattctgaacaagatatgatgactgtcccttctggggaattaagatgatgtatgtgtttttttaaatgaaccaaaaacttaagatcattaatagcttatttaaatcacatacatacattatttatagataaagtaggattaaaaatatcaagtaatttagcctttttgtttgttcatggtagtacaatcttggttttccatttctctctgtcacactgtcacactcctgaaaccttgtcctaccttataattttaggtattcctgcctcattcatatttgattttcaagccatactcagtctacacatatggctttagggagatgtagcatgaaaatctccaaaagaaaattgctgttatttacttactattatcatccattttcctccaacaaaagaaaagagagaaaaggagagaataaaaaagagagaatctccaaatattcagtaagacatacatattatagataacaatgtgtttaatttaggctatatgaatataaaagagatgtttcttatttagtagtagcaatttgtgggcgaaggagttggcaatgataaaaatgtccaaagtcacaaatacagtatatagttagtcatgggtggtgttatttggctcaaaaatagacttttattttgcctttctttctcttaaccacatttggaattagaagagtgatgagaaccagcaggaaggtagaacaaaaagccaatgacattagagaagtgttcaaacagccagctaaattcactgcacttctcaaccacagaaatattttcaggtgattctgtttttgagaaaacgtgggaaccacaggatctacaacacttccaggcaaaactcaacagctctaataatagtgacagaagtgaaagccaatttggataaaataagacattgactcaaagtcctctgagagatttttcaaaacaaagtttacaaagctccttttgccttttgggaaatcacattcttctttgcaccttgactctttttctgaatttctttctgtctgggaggatctccctacagtgtttcttctccatctgacatcatgaaatgtgatactcaagcaggagaatcgcttgagtcctggaggcagagattgcagtgagccaagatcgcgccactgcacttcagcctggatgacagagcgatactctgtctcaaaaaaaaaaaaaaaaaaagaaaaaaaaagaaaaagaaacaaggatataatgagatgtctttgttctatgcctttgtatccctccagacaaatcttttttgttgaactgttgtgccccaaacttttcctctgttaaatgaaagagctgagatcaatgttgtttaagatccttctgtttgtaactttctatccatagtctccaggcctcttctaccttgctggtttggttattaccctcatcagctcttcaaaatctggtgtgatcaaatttatgttttgataaattcactattgttgcagtatggaaaacagattggagaggaagatggggttggggttatagagataagagactaaggcagtaattctagaataaattgatggggatatgatcacatgtaggaatagcagtgaatagagtcagaagagacatatggtgttaagctgtctggaagcagctttactggtttggatctggtgaggagaaaggagaagtcgaagatcatgggcaggctctgggcttaggtcatctgtgtgcgtcagtgtcctaggctggaacacagaaggacagtcaacattagggaactgataacatttggttttggacttgaaatgtattggggacactgtcacctgaatgtttctggacacttgagggctatgactttcacccagcacatacctgaagcctatctcaccacacacatgtcatggcatctggaaaaaaattcaaatcggacaataattttgaaaaacattgtagatttttctggaagtctccttggaaagacagaggaaataagttacattgcatgttatatattaatatgtctttaaaatcacccttgcatctatctcttgccccaagtttcagctctctataacaatatttatttcctttccttttcttaaaaaacaatcaaacagaaacttttcttctctaaccaccatcttctgaaatgtgaaaactttgcagctttcatcctcttagacatgaagctcggaagccagtcttggccttgggtagtttcattgcataatgccacacttacatctcaattttattattaagcacgtcatattcttgttaattatatattagtctcctctattatttgatactgagcgtttcagggacatgattttgttgcttcttgtttgttcgtttgtttttctttttgagacggagtctcgctctgtcgcccaggctggagtgcagtggcgcgatctcagctcactgcaagctccgcctcccgggttcacaccattctcctgcctcagcctcccgagtagttgggactacaggcacccaacaccacgcccggctaatttttgtatatttttagtagagacggggtttcaccgtgttagccaggatgtgtgtgtgtttgtgtgtgtgtgtgtgtgtgtgtgtgtttaattgtaatgccataacttaggttatttatattaggtaggaaatacatgtttattgactgaaaacaattatatttagacatcagctaattatttttcaaatcacaattattttcacaaaatttccctggacttcgtaggttgaagaaaactctcttatagattccctaaatcaattaattttatttctggtctctggcttacacttaccatatgcttcatcacgctaagttaattccatacatattatatccttattctgctaatcaaagtttattagtctttgtattcccaatacccaccctatggtttgactaggtcaggtgccgaaaaagtattttttgtaagtaaagctgtgaaggtatcaatgaatgaatgtctgttctcgtgtttaggtttgtgtttgcgaactgttgtttctctctatattttcttgctctctataaaacacgtctgtttctgattgttcatcttatactaacccagtttgattttgcttgacagcagggaccttttttttcttagtttgtattcgtttattacatgtcctgtttttacattttactttttgctaatgccaattgcttaaaatatactaattgaatgaagacttgcaatcacagtcctgtgggatatccagtctgttatcctcacaatgacatcctcaagtttaaaaagtgggcactcataagaaattgaacaaaatttgtgatatcctagcaacaaagaaggggcaaaaactactgaaaagtttcctgatggtgtttatccccatgtgatattgcaccttctgagaacatgtttgaaatttagtacctgttcacagggaatttttaaaacattaacacttagttgcactaacctgtgttgtgtgtgttgtttttttttttttgttttcagtagcaatgtacatctaaaagttttctcaattggattatgtgtcatagaaagtacatatgtcttctacagcatctgcaagacatttgaaatattttatgaatcttttagcagagaataacatcacctacttgaaagtgcaaaaaacttttgaaaaattatgtggagatggttcaagtgtaccaaaataggaccactgcatagaaaatgataaatgtccctttaattagaatgacagcaggaatttaggaaggcagaatttaatgtaattaaaattagaaaatcattgttaacaagagttatgttacatttcttgatgagaacacaatgaggaatttttaatttcggatgaatcaataattttatttttatgtctctcttgagcctgttctaattaaaagagtatggaagatcaattagaggaaacattctaaacttcccttgtctcaattacaaaattttgcttgagaagtatgttcacaacatttagtgaaagttaaaaaactgatactttaaaaacaaatatgaatgtaaggaaccaagaatattattcaagtccaggagtaaagaatagatatagctgtacaatttatttttgttcattactgcttacctacttattgacatttttaaaattaaagtatatatttaaatagttactaaaatgaatatgctagcaattcagaaaatttggaaacacagaaaagaacagagggaaattacccaaaaccctgccaggtaagaataaccactgttgatattttcttctagtctttctccaggtcagacatatttcaagacgatggtcgccctgttcaaaatattttgtagcacacttttctacttagaaatttatccagaacacttttcatatcaaatattattccactgagtgatttaatggccacatggcatcatcccatatgggtgtaacagtgtatattaatgtcccaccagttcacatttgtttctagtttattattgtttttattattaatattcttttaaattgataactcataattatatatatttatggggtaccatgtgatgtgttgatttatgcatataatttgaaataattaaactgagcaaattaacatatccatcacctcatttgcttatcatttttatggtgagacaatcaaaatgtacttagttattttgaaatatacaatacattatgattgactccagtcaccctactgtgcaatagatctcaaatgtattcctgctgtctatctgaaactttgtaccctttgaccaacaatgcttattgacattttttattaaggaagaaaagttttatcatgatcacattctgaacctgcatggtgaatttaaattgtaaattatgcattgcaattgcacatcaggtttttcagctttgattctcttaattgaacataaacttaagattaaggtgctcagtttattaagcagaagaaacaccacataaaacagttctacactgtgtcaaaaaggaaaaaaaatgctacaaataaattgtattgtaccacatattaaatgagaaaaaaaatgcttaaagagaaattatttttaacatactaatgaaaagagggaagtttttaatttattgtggtaattacagcttagatatggatttaaatgttagttatcaccactcgtgtgtggtgccactactgtcttgggatggagagcatggtagggtaggagagttttggactcggaatttatcactaccactgtgccaataataatattgaaagttaatttttattgaatttaatatgtaccagttactttatatgcattatctctttaaatcttcacagaaatcctgtgaggtactataatcgttactcacctttttcagatgactagttggagttacaggaaagttaagcaaactgacaaaaattagtagccaataagagccaaagctaggattcaaatcaagtcttttaattcataagactgtgctcctcagaatttaatgttctagtgtttaggtttgtttttatgcactattatcaacaatctgtgtatttttctctctacatataaaactcttctctttttatgattgtctgccttatgctaatccagttttattttacttgagatcgagaaaaatttccttccttattttgtatgctttaattacatttcctacttccacacttgtctaatgctaagtagatatgctaataagtgctaatgagttgttggggccaggattcaaaccacggaatctaacttgcttgagcccgtgttcttcacaacagggccacatggcttcaagaaagacaagttatctctctgactcagtttcctcatctataaaatgtgtaaagggagttagatgcctgatatgatttggctctgtgtccccacccaaatctcatcctgtagctgctataattcctacatgttgtgggagggacctgatgggagatgactgaatcatggaggcaggtatttcctgtgctgttctggtgatagtgaatggatctcatgagatctgatggtttaaaaaaagggagtttccctgcacacactctctctttgcctgccaccatccatgtaagacgtgacttgctcctccttgccttccaccatgattgtgaggcctccccagccacgcagaactgtgagtccagttatacctctttcttttgtaaattgctcagtcttgggtatgtctttatcagcactgtgataatgaactaatacattgccttttaaggaccttttcctctcaatagtttaatcattgtatatgattattctaggccaatgcagggctaaggaaaatagagctctttatggaacagaacaataaacattgctgtattgcgattttcaatggctggggctggtcttagtttccattcctacaggacccagttaaggattgaaatataagtagtgtgggatcccaggacatatcagtaggaaagcagagcagtgaagttaagtgggctggtgatatggtgtgctatcaagcaagtcaccactgtggataaaagcagcttaatctctcaagggaattcagaaaagcacagaacacagcttggaagttccattatgtgagagaggctgccaggatacttactagtgagggctactcccagaggctagttaggcacttccagcctgctaagtctgtaaacagaaagggctcaagagaccagaggaagcacccaggcaaagaaattcaggtgcaaaccatttaaaatcacacctgaaggatttaggggatctgcctggagacacttttccacaggatgtgctgacaaacttaacttttaggttaagagttattctgaaacgtttttttgtttgctattgtacagttaactttattttctggaataatacagtcttcttccttgtcttagtaaatgcagtgtaaagaacataattgaatctctttgatgattaagtttcctgaagtccctcagtgccctattatgaccaaagtttgggtattttcattttacctcagaaaatggtttcacataccatgacgcctcagagaaatagttcatatgagatctctgaaaatacaaggagagaacttggaagcccaaatgatggcttttatttttttctgccttgcctcagagaaatgcacctaccataaacgcaattctaatccttttagagcaaaacaatttccagctctacttttgtgacatcttagcgtacccttagaaatataattctcaagaaaacacacacataaagcaacagccaacaaattttgaatcaatcctatttcattttattttcaaaatgtacatagagcatgaaacacattttaggaagtagttcctttaatgaaataacatcagaataataggtgctctaatctacaatgcttactaataactgctttattaagctaagagagaataaaaatcatggacactgaaggaccatgaaaagaacatatgtactgacccaaagtggttctaatttttaggactgaaaaggagattcactgagtgaagagaggaaataaattattacacaaaaaattaaatttttttatacagcctttaaatttgtttttctagattccctgttgctcttgtacctttccactttttaataaatttattttgttatgtgagatttcctctctctctctctttctttcttccgcctcttttctcccaaaccctttctccatcttagccagtgtggggcaagaagatagctattattacagaacttctctctcttgcagtcctaaacattctctattgatttcagaagaggcattctgggaaattcacagacatggctttgaatttcttgttttggtcctttcagcaaatttataaaatgatatataatgtatctgtcatactgtttttcaacatccattcaaataaaaattaatttaatcttaaaattgaatatataattttgttttgaaagtggttaaagaatgcttaaatgtgtctacaaagaatagcatgacatctttaatgcaaatatttataactgagaattgtttaaatgactttgtaggttcaacatcctatgttaactggaagcaaacacatattccagtttatattaatagcatctttttggaagagaccgctactgttcattgaagtcctttgtcaccttcctctgtgataagagttgtaactagaatacagttacccggagaaagactatattttttagtcccgcttgaagctatgtttgaccaattaactaaattattgccagtggaatgtgaacagaaatggtgggtactaattctgctcctgagtcttagaaaattgaacatatgttattccatgtccttctgccccttttatggaacatagctttgaaccttcagataaggacaatgctcaaggaggtgaaaaagtaaaaatatgcaaagaaactgggccctaaaggattgcgtagactgggggagtctcctgtgaaagtatctggcttattgtagaatttatatgtggcatcagaaaacaaacaaacaaacaaaaaaaaatgatgttttctttaaaccgtttattttggggtctctttgttctttatattagctaatgcattactcaataggcagggatgtttctatcccctgaagccacagcaattatctcaaagaaactttattctcctcaccaagcaaaggaggttagggagcacagagttgattaatgcgtgcttccagtctgggcataatggaacagctcattaaatacattgttgaactgttggtagcagacatttgagaaaacagcataaaggttataaaggttgctttttttttcccccctaccaaatggaaatcttattgctttgaaagtaatttaagatgagctttaaatctcaaaagtgcaatgattatacctacataatttccatgtttatggattcaaacacaaatactctggtggtaaggatgggaaattaacatccttatatctgccatcaatttcatctaatatcatgatgaccgtatggttttggaattatcagtctaatgtaaaattgacaaaaatgaaactcattttttgacaatggagataataatgataatagcagaaaagggagaaaagtatagagaaaggtaaaggaagaaaaaatgtgtatgattgcatctaacgcaaaagaaaatcaaagaatagacatacaattgcttatttgataaagaaggatcccagtcatacagttgcttgagggtggtagaggaaacaacacctggtggctgtatgttcttggactgttatgtcagatctccaaaaatagcttcttgaatagttgtattaataaaatttggaagtttgccatagccattgtattagtttcctaaggctgctgtcatttatctcaaactgggtggcttaaaataacaggaatgtattctctcattgttctggaggctagaagtccaaaatcaaggtgcgagcagagccatgctccctccagagcctgtagggaaagattctgccttttgtcatcaagcttctgctagtcccaggcattctttggcttggggcagcctaattccaatctctgcccccatcttcacagctgtctccttctgtctgagtgcctttgtgcaacaagagagttccctgaccccctcgcaggacatgtgacacgggtgtggctcgtctgttcagccgctgcgcatgctcaaaccccttatgggaggggaagcacacagacgggcaggtgcaggagcctgggcaagcactttttgggctccaaccccacggtgacatctaagggtgggtgccggcaactcccaatagtgctcttttatttctgccatctgcagacgacttgtgttaaccagctcagtgccctcttagtacccaggttcttgtccggcatccaggaacaatcaggtcacacacggacttgaaggatagtgaatgcagaggttttattgagtggtggaggtggctctcagagagatggatggggagctgggaaagggatggaatgggaagatgatcttcccctgaaatttggccatccagtggctgatctcttggactatccccagctgcgcttctcttgacgttcagacattccttcccttctctccttctctgctgcaccaatccgcctaaataggaatgtctattcctatttagggccgtgggtttccaggcttggggttggggcctttgctggggaactgccctcttctaccctgtacttccctgtttcctgtgtgtgtcatctgcatcttaacatgaatgtctcccctcttctgataaaacatcaatcatactgggttaagggtccaccgtgctccagtatgtcctcatcttaatgcaactaactgcatctttaatgaccctttttataaaggcttaggactttaacatatctttttattggagaaatgattcaacctatggcataattagtagcaaattaattttcccaaatgaaatataatattctactaagattggtctatttttagttcttctgattcttctattttaaaagaactgaaaaaaatcctgactttataacacactaaaaataattattaaaatacgtaactgagagttaaatcatcttgtttttatcttaaaataaaggcaaaaatgtgtcaaaattcaaaaagactgttttcattgcccattcagcaaactctgtatctgtaagctttctttctttcctagaaatggcattaagcattgaatgggccaaaaaaaaaaaaaaaaaaggtaaataaaaagacttggacactttacaatcaaattgcacttggcaaaggaaagaacttcaatatgctttttagaaagatcttgtgtatagaatcatacccataatatacagtcattaaagctgtcaaagtcacaaataaaaatccaattataataaattagtttatatttcttaaagattttaaaaattgatttctaaataaagcaatccaaaatatctcataaaaatcttccaacatttataaaataacagcagattgttttaccgtattggtctttatgtattgtatttgaccattcttcctctgtttgtcttttacaggggctttgaaataaaagatcttctatttcttattctgtttcccaaaacagctttatttgtgtgagaaccagtgaagaattgggcaaaccttctttttcatgaaactagtaagaagtttgacagtctggctgctagcctgaattttatggcacaactgtacttataaagatagaatttcaattacacaaatcaccttggcactgtctttttaaaagagaacagtttatccccctcatatttcagtaatattcttctgaattagatctatgctaccaaaaccaaatcaaaagctacattacatgccacattataaaagatcaggctttataagagatttgagtttcctcaaatgaaagaacaggctaccttactaattgtgttaaggatctagaaaacaaggaaacattcttgactctatcttgcttacttccctaatattataattaaagactagaatagtaaataagctccttaagtacaagcaataaataggatcaactgtaaaaccacaatttcactacaagacgacattccttttttaaacagtttttttctctacatcttatgtcagtaaataacaatgtattgtcttcttgagagctataatatgacttcgttttctaccaatttcctttgtaatgtcctatagggaaaggtatctttcaaattcaaatccccagcgtagctcttggcatatgttagatgttcaataaatgtctgcagtgtgctatgggttgaatgtttttgtcctcagaccccaaattcatttgttgaaacattaagtcccaatgtgacggtatttggaggtggggcctttcggaaacatttagcccatgaaaggggagccctcatgaatgagattagtgccttcataagaaaagacatgaaagagacaatctgtctctctttctcccatgtgaggatacagcaagaaggtggctggctgtcttcaaaccagaaatagagctctcaccacacactgaatctgctggcaccttgatcttggacttcccaggctctcgaactgtaagaaataaatgtttgctgtttaagtcacccaggctatgataatttgttatgtcagccagagctaactaaaacatggtgtaaatgagaaaccaaggaaattaaaagggagaaaacaccagccagtgatggagttttacggtggtgaccaaagcaggcactatcatccacacagttcaagtttcctgtagctgccttactgatccttgctctataccagtggctatgtattgacaaacaatatctgtatcagagaggatctcccttgcaatattagatatttttttgcaaatattgaaggtgatttcgaagcacattcttgaaattttcaaaatccatttagaaattatcagattctctttaagaaaagtaaattaaggtgtggtggtctcctctggcatgagacctttataactctgtactttctctgactagtactgaaaccatcatttttagtaatatctccttctgtatcatgaaccatgcacacaagaccctaggcttgccattttgtggactgctgcttttttttttttcttttgtaatccttgacttcagactaattcacattctgtccactcttatgttgctgcacgaatgccttccctgctactagcggatgacttttctgttagttgaccctgcagaaacactttactgcctttttgctacaaagcaggacaggataatatatctcagtcaaaatatctcatttctccctgctgaatgtatctgaaaattcatgtttccatcaacacctgctgaaacacccacttggagaaacactgaagatgtccttattgagaaaacgtttgtggctaaaactatgtcctccctttcccatgtatagttcactggggagggtttcaaggccaaggaaattcaggcttcccaaatgtatcctaatgaggtcatctttgacatgttctccaaaaaactcccatggattgcttccgaattgttgcactaaccaaatctgtcatttgctactaacttctatagctgcaattcgaacacgtaaggtaatgtttttaatgatcataaagcttagaaattaggtaatcagcctaagtcaactttaacatgcatactatatagttttcccccaagctttgataccaaatatctttatttcatgccaggagatataatcaaaacataaagggaaagtactcttttattattatttttaatctgtgcatcatttcttttaattgtgctttgtgtttttttaaagtggtaacttcacttttgatgttatattctctggaaatatcattttgacgttttaaacaagtattcaggtgactttactaattgctgttctttttctcctttaaagtatgggattatttaaagtcaattattcctccctattatttgaaataaaaaattgtgatgcaggaaacattcttagttttcaatataaaattcaatttccataaaattccctgcaagaaaacgtttagtgttataccattgtttaacaaaatatatttaaataataattcagttaaatctgtttttagcttaaaggatacttttttcatgaagtagagctaccttttaaccactttaatagtagccaatgagaaagaaataaagtaacataatattttgaaaaatataattacttacatccaacctttaagaacaataaaatcttggtgctaaaccaaaacagttcaatattcactctatgatatctcttggtaagagacttcttttcaagatttgccaatgcctaaaaatcttgagttcaaatgatcctatggagaaacaattttatatcaaattattttaatgagcagtatttactatatgatcttcagttacatcacttctgcaactacggcacagatccgtaattgaaaaacaaaagagctctaatgtgtgagttcacactctaaatcggactttctctatacaaagcatgaaggtcttagccaaaatcattctagggtttttaaatgagcacatagttcaaagaatgtcagagaatgcccagttctctgcagcttgaactcctcactgctgccccgtatgatgcaaataaatggtctagctcagggctgcttcagaggctgactatagcctgagagagggttaataatcataagaacaacaaggatctgggctgagttcttactgattatccttaattttcctaataatctattgaagcagatgtcacttcattttaggaatgaggaaattacagtttgaaaaatgaaagtaatggttcaaaactatccaggtagcaagtgcacaagttatcatttgattgtaaagtccatgttcataaaacatctcatattattctagctcaactttggaggaataggctgctgtgggcttgaaacttaactggaaaaacttagttggctcgattctgagaaatatgattctgcctttttccttagtcttccttcaacaccttgccttgtctcatcccagtcttgacattctgcatagagccaagtgagttaaaagagacttccttgatgtttcctcacttcctgcttctcagcacatattaaagtcacttccttaatgccctccatgttctccctttgtgctccatttctttgtgttagaacagtaagagagcacatgcttggtggtactcagatttcttttctgaacccacattactcaaaatactgttttctgatttcttagatggatttattctaagacccacaactgaatcttctgaaccccaatcattctcactggccaaactgtaaagtgaaatgtcataatcacttatgagagcaaacaataactgattgttataattaattttcttgtgtaatcacacaacgactactgaaaagataatagaaaggtagtagtgattattatacaatagcaaaaagaaagattattgccattactctggtcctcattacgtagcctatgagatgtaaatcatctcctgtattatcaccctgatgagaatcttttatctatttaataatttaaaaaaagttattgagccccctcttcttgccagggactgttctgggtgccagggatacataaaagaacaagatttgccttccagtatttcacatttcatttggtatggaaaggggactgaggagtagcaattatacataaataagtaaacaaaaaatggataataagttctattgttcaattaaaatttaatttaaaagacattatagagaatgactagttctgaaaagatctttttggtaaagtcagattcaagcttatttctgagtgacaaaaagaagctagttaaacaaacactattggcatcccattaccatttgtacaactggatctttatcaagaatattagtgagtcagcaaagagtttttaacgagtatcttaaaatttatgtgaaatatctctgaaaatgaaacttcctgtgggaattccattgaagacgtcaccaaacctacctccttcttaactgtggtgaactagagttcttcttccagattggggtgatattaactatagattatccctctctgtgtgtgtaggcatggggcagggggcaggcagatgtagttattaatgaaataatgtgataaataaacacatcacaaaagaatatacctgctgatttatggtactttttaaaccatatcacttaagactatgtacttgtagaaacgcctgtgatgtttaatttgatagaagtacctacttccggattttgaccgttctcagtcttcttattcttggtgcatttagactgtatctgccttattcaaagatatgacaaaggccataaatgctgaggtgtggataataaaattattcctgaaaaacaacctctgattatcttagactttgtaaagttaaaatagcgatagtggcttctattttgttattcctaaaagaataataactacaatcaccctgactttctgctctggggcactttttcatcagggtgcaaggaggagagcccaaacaaagtatgcatcctggctaagaaaagaagacaaaacttagtgtgttggggggctgatgccgctaggatttgtcaggcagactagcagagaagagagctatagagaaatctgcagagcacttcagaaaagagagctatacagaaatctacagagcatttcagaaatctacatagcacttcagtttctttgagtctgtggctagatattaatctgcatatgcatggagtgaaaccccattagaacagacaaagaattaccagggatccttaatgtgatcaaatcccagaatttaaacaggacaacgatgcgtgagttctgaccagccagattgcagtgattttagtgattatcaaggttattcagtagaaattccagaagcataacatcttggttgtaatacctagcctgaaaggattttttagctccaccttaataaagcttaaaaacaagctttaaaataatcaaggtaaacaagcaatttaccaaaatcaaatttaacattctttgaaggaagaaaataaaatgtagacattcaacaatttaacatatacaatgttcagaagtgaatacaactttctaggtattccaagaaacagaaaatataatttataatcaggagaaaaattagtaataaaacattcccagaaatgataagaatgatgatactatcagataagaacaggcaaactgccaagaatgtaaagaaagacaaaatgagaagtgaaatggacataataagaagtgaaatggaatttgttttaaaaaataaaatgggaagaccaaatgtaatttctaaaggagaatctgaaatgcaaattttgctggatgggattaacagaagattaaaggccaagaaaagatcaatgaacttccagtcaagcaataaaaaccagtcaaactggagcacacaagagaaaaagccccaaagaaaagtttaacagagccttcataataagacctgtgggacaagaacatacagaagattggaatccaatgatgtgtagtcaaaagaataatttctaaagagggaatagacaaaagttttctttaaaaaataagctctaaaaaaaaccctatacagtcaagattaatgaactcaagtaagataaagatcaaggaaaccactctaagacatatcttatcagatttctgaaaaccagtaatataaataaataaataaataaataaataaataaataaataaatgtcagccaaaggaaaaaaaatacactgtacctacaagggaagacttttaagaataactacagacatttagcttttaaaaagtgaaagtaatgtggttgaaattgaagaagaaaatattctaagcaaaagaaaccagacacaaagaaatatactgtctatttttatgtaaatcaaattttaaaatgggcaaaagtaaatttaaaaagatcagtgttagtccctgaagtgggataattcaaagcaatgattcagaaagaaaatttttgacatatgaaaggaaaataaatcttgggaccccaaactcactaagccaaagagtaaagtcaaggggaaagctgggtcatgcaaacctgcctcccacttggttcctaaataatatgactacaaaggtaaaaagctacatatatccctcacaactttcccacatggaaattctttgtgggctccaacatctttatcctaaagcatttctgtgaatttgaccctggcaatataaattgatagtttaccttcacaagggcgggacaaaggatagagctcaaagtcatccctctgctcacctgagacaaatgagtatctgactgcttcctctgccatattatctaagttatcttacataaaattaccaattcactgagccagatgaaggcatgagtgactatttcctctactctcctctctcatgaaaattgtatattcagtgaaaggctgatcaaagactccagagggtgcaactgttttgtcttattgtctactgacacattttaaaaatatttctgttccctcagtatccactgtttcccctttaaatactgaagccctcaagatcatcttcggagaaaggcatagacctgcctcctgggtgtgtgaccttaactttggcaaataaacctcctcaagtgattaagacttgctttggtaattttcttggatttacagagataatatcaatgttacctatctgggttgtgattacatggtttatatatttatcataaaatatcaatgtgtacacttaaaatgggtttattttattgtgtataaatttttactcaataaagtggatttcaaaaacaaaaacagaatagaggtcataaaaggcgaagatgtaaacgtgtaaaagtgttcctgacacgaaaagattaccacaatcgcgcactcaatttccttataattctttaggaacctagggtgacagagaaacacattgttttatatatgtatttatatttatatttatatgtatatatttttgactaacaacagaaatcgaggatattcatttactgagatataatttttcctaagaagttaatcttggcaaagaaggtgatgtttatgtaaaagaaacgtttgacaactcaaaggctaatgctttcaactctagttttagcaaaggtacaaatgctgttcaaataaataatgcatgtaccaaatatctttacatgaagtaaaagctttttttgcagcagttgagacaacatggctcaggtacactttggcttctacacatctactctaattcattaatggagctttaggatctaggagaaggcatagttaatacagccattagagtagctcttaaatatctgatttctcaaatgaaggttagagaaaatctagattgtaattaatttatatatgcatattctgagaagaacttttagtacatgtattctaaattgttgaataaagagaaagccatgcacttcaaataccagatatttgttagacaaagttgcattcttctgtgtaacattaaaagtaaaacttgtattttcacccaaaaagaaggctatcaccctttaacacaaatgtagaaagtaaaagtcatttggtaccgaattgttttttctctctgaaaaagaaaaagaagctttggatcatctcagtggttaaaaccataatcgataaatattccagtgctctgtattatgtaattggaacagaaaactattttttagttggttgtcattcttctgtgctcttgaattcttctaaaatttactttgtctttctaaaattatttttcattttattttatgtattaataattgatcaatattatttttgatgaacaaatcatcatcatatatattgataaaatacactgtgatgttttgacatatgtgtacaatgtggaatgatcaaataaagctaacaaacatattcatcacctcatgtacctattatttctttttggtgagacatttgaatttactctgttatgttgaaataagcaatatattattattgactgtgtaaaatttaccataccttttaaaaaatgggctgagggtttagatgctggccaagatgaagtaattttactataacctatctctttcactgattatcttaaaaactcaggacaaaatattaaaagtaacatctgaagactcagagaaataagcaataaaaggcacatggggaaggggaagtaaaaacttgaagaatatcctttttggggtaatttttccatttctttctgctcttttatctcctatcttgtacgtgaggtatctctagtcatagaactatgcaagagttgcagtcagcaaaaactccatgcgaaaccagaggaccagaaaaagggattcctgcgagctggacggtgtagaaggaatcccattaaattttcttgtttctcatttttctcccctaaccctgttctaatgggcaactgaaattctgaaaacaacaacaacaagaacaaaaccatgtttctggcctgaaggactgactgaaaaacaggctcacatagtccaagagtgaggatggaatacccattattttctgtcttttttcctcattgctttgcctgataacagtgaccagtcatgaggaaatgcacagaagaatcttaggtgactaaaattctaaaagaactactatatttctctccagatgatggggaaaagggagttcctagaggccaaagcatgtgatgagaatcccagagaagacagtctggagagggggctcccccaattctctgtataaaaaagcacaaacattaggctcacccctgaactgcatgtatgtagtacagccccaaactaacataaaaaaaaggctttgggaactaaattacaatagaaaccaacacctaaggcccagactaactcctcagtgacacatgcctggaagacacgaaaacagcttatcattgaccttgtaaattgaactaacattagaaccaccaaccacagaaggcgagacagatacatggtctgaaagtaactggattgattgtctcctaaaaccaaccaaccaaccaaccaacaaacaagcaaacaaaacagacatttatgggacaattttaatagaacccagcatctcgcaacttcatattttcaaaattaaaaatacagtctaaaattactcaacttaaaaaaagtcccaggaatatgtgaccaattctcaagtgaaatgataacaaaaagatgccaattccaagatgaagccaatactggaattatcagataaagactttaaaacagtgagtataataacagtgttccatgacttaaaggtaatcacccttgaaatgaatgaaaacatggaaattttggtagagaagtaaaatgtatttttttaaaatccacatgaaaaatttagaactaaaaaatataacattttaaataagcactgtatagactcaatagctgcatggatgtgacagacggatgagtcattgaacacaaatacagagtaatagaaattatttaatctaaagaacagaggcagaaggctgaaaaattaacagtgttaggaaaccgtggaacaatataaaaagttgtaagttagcgccatgtcattggtgtctcagataaagaggagaaagattgttgaaaaaatgttaaataaaaatgtctgaaagcttctcagatgtgatgaaggatacacatttgtaaattcgagaagcttagcaaactcagaggggtaaagttaaaaaataccagaaccagacacatatcaaaatcaaattgctgaaaaccaaataaaaagaaaacctgaaactttcattctttattgttgggaatgcaaaatgattcagcaaattttaatgatagtttggccgttttcaattaagttacacagaattgagcgttgagcactatgggtttgaatggcacaagttgactaacatgtgaaattttcttctgcctctgccccctacaacagccagaccatccctccccttcctccttctcaatagtctaccaaatatgaacacaatgagaatgaagacctttatgatggtcctcttccacttaatgatttgtaaatatattatctctttctttatgattttcttaacattttcttttctgtagcttcctttattgtaagaatacaatatacaatatacataatatacaaaatatgggttaatcaactgtttacattattgataagtcttccagtcaactgtaggctattagaagttacatttttggggaagtcaaaagttatacacaaagttttgactgtgcagtggtcatacctctagcccccatgttgttcaagggtcaactgtatacatttactgtatgacccaacaatttcacttctaggtatttacccaaggtaaatgaaaactgaagttcacacaaaaccttgtacataagtgtttatagtagttttatttacaatttctcaaaactggaaacaattggaatatgcgtcaactgttgagtggataaacaaactatgtcacctccatgcaaaggaacacatctgcacaacaaaaacgaatgaactattaatactcccagaagcgtggatgaatctcaaatgcattatgcttagtgagagaagctacactcactatattattcagttgatatgacattctggaaaaagtaaccgtaatgctcaaaacaggttaatggttgctagaggtcaagtagggagaggagatgactacaaaggggcagcttgaaaaatttctagtgacaatggaattattctgcatcttaattttgatggtggtgacataacactatgcattttttaaaagttacaaaacttcacaaaaatgtggttattattctatgtaaattaaaagctgaataaattaaaaacaaatggaaaagcttattagtaaatattgaacaaaatgttcaaacaaaacctttctaatgaacatatgttattgacattcaatgttaaattggcactattcttttctcaatattgttaatttaaaaactatatccttctttatttaaaacatattatcaatatagcccaaatcttcaacaacaaattaggaaatatactagaaattatatttgcttcttacaacagcaaaacaacaataaaatacttagaaataatcatatcaaaaaatgttaacaggatctagataacaaaatattttttctactgacagacacaaacaaagaaagggtaaataaaaggtcaagttatgttctttgatgggagaataaattatatttttaaaaattaagatcccaataaaaatatcaacatagtatttttaaaactattgaagttgaatctaaagttcatctggaaaaccaaacaagtttttaaaagccagaaatattttggtcaataagagaattggctgtggaggattgggtgcagcagcttaaaccattattccataattatgatcccataattaattgtgctcttctcttttacaaagatgcagaccagtcattggaaatatacataaaatacagaaataggcacaaattcatttgaatgttactgtgtaataaagcaatattttgtatcagcaagaaaaaaatgcactgtccaattaatggcatttttattactacgaccggaagccacctggaaaaacaaacttgtgttcttatcttactcattataacaaaatataaacttgaggttaatcaagacggaaatcaaatattaaaaatactccaggctgggcactgtggctcatgcctgtaatcccagcactttgggaggctgaggtgggcggatcacctgagttcaggagttcaagacgagcctggccaacatggtgaaaccccgtctctataaaaatacaaaaaaaagtaagccaggcatgacggtgggtgcctgtaatcccagtaactctggagcctgaggcgggagaatcgcttgatcccgggaggcggaagtagcagtgagctgtgatcgtgccattgcactccagcctggacgactgatcaagactccatctcaaaaaaaaaaaagtactccaaaacacttgatagatttttctcctaagctctcagaataggaatgacttaacacaggatagaaatctattcaacagattcacacacatttttagatgcggtgacttcacataggatggaaacggaagtttccatgtgtaatatataatgactacctagagataagcctggttaaaacaacctcttttgagattataaacttttctgattttgctcatttgcataacaagaatcttggccaaagtggctatgtaggtttcatctagttcacatatctggctatgatgggagttcctccaggccagtcaaacccggggacacacatggaattcacagtaactagtaagccacttctctctagctcagtcgcaaagtctctcacactgaagaataacacaccactgaaacttctcgctgagctccagcagcagccaataaaagtgttcctttgctctttggtacaactgaagacatttacatggacattttttcttattctaccactccttactctattcctatgtttatctcacagctgatacttttggggcttttcatttatcattttctagttgactcctaagataaacaaagagcttacaacaattcctagtacattataggcattcattaaatgtttgctatgctgctgttgctgctaatgatggtcttgcaaaatttttcatttcagaaggtacctagtgtcacttactcagcaacatatggattgcatctttaggaattatcctttctgttgcattagaagaatccttaccagttagaagcccctgttacccatacattataatgttatggttaagagataagtataaactatatttaggagacatctttcctagttattaatggtttgaacttggacaagttgcttaaacattttgcctcagttttctcatttttaagcatttgacaataacatatattttgtggagtttttctgaagataaatcaaaataatacaggtaaagtgtccctatatacatctgagtatccagagacgagggatgggtcatgctttactcctcattgtgtctccggtgacaaacataaaaacaaaagtcatttatccatctaatgcacaactctttttggaaggtacaatgagcaaaatgttctctaagtttccttttagtcctctattatacattttattgcaagttgtggaaataaattattcacattggatttacgacgacacatctttcaattattagttattaagacatggtggtaaagaatagcagctaataaatatacaagatatgatctatttttaaaatcattattttgcaatccaaaatatttggcacattcaagaatcatctataaatgctacccatttggcagaagctttttagggagtagaataacatatggccacaaaacattactatagagataatttatcaattacaaaggggtaaatacactttttctatggagagacccagtggtcaccactttagtgaacgaaattagcattatcaataataagacaacatgacattatgggccttcctatgtgacacaataagaaatactgttatgaaagatcctggcacaaatgttaaatctgaaattgatcgcaaggtatacataagaaaaatcctaaacaatgactggcttaaccttcaagataacagaatcataagcagccacaaaaaaggtaaaacaatattttagattaaaagcaactaaagtagcataaccactaaaggcaatgcatgagcactggttaatagatataaaaaaattgggatggacaattaggaatatttaaattgtcaacattttcatttcaattctaaaaataattaatttgactacatttcaaaacaaatatatatttcaaatattctaacatatgacaatgatattttgcttctgtagggaatgatatattttgataaggaagtattcatattcgtatgtatatatacacacacacacaaacccacatatatgtaaagagagagagacacagagagagataaagagaaaaataaagcaaatgtgacaaactgttaatagttggagagtcttggtgaattgtaaatgggtgttcgtggtaatatttcaacttaataaaatgggaggaaaacttaatacattgggaagaaaaatacatggaagtgaattgtctaattcaaaacacataacttagtaatgggttctctggacaacttttacaaaaaggattctagaataatccagtttgttaacttgattttctgtcacatagttttccttctgaaccggaggctcagtccctcacacccctgctggcatacatgcttttagccttcatcctatgttgagttagtatgcatagtgtatactcaaaaaatgctaagttaattgattttaaaattagctctttaagcactcaaaacaatttcaaaggacactctgctgaaaaacaattatctaatgtactttatacttaaatattcattcatttttgtattctacaatgttgatattgtccaaatctctgccaatcactaggagaatatcaagctaaaaatttactaaatgatttttaaaaagtatattgcttatttgtctcttgagtagcatgtcaaaaggggacttaaattaactcagggtatttcattaatcactagagaaaaatgcctaggactcattttattgtcaacattttgatgatacagaattctagaaaattcatcatcttatttatgtttcaaaacttatacgacatatttaaaatattaacatactacaatggtattttgctcctgtaggaaacaatatatttcaatacggaagtattcacattcatatatatatatatatatacacgtacacatataaacacgcatatatgtaaagagagacacagacagagggaagtggactcctcaaacacaatgctttaatatttatccttaagactagcattgtttttgacatgaccctatgattaatcaaatgctcgatagaagtagaccacgttgctttgagtttcattagcctcacatcgatgtgtcctaatagggaatagtcaagatggtgtgttggcctctttgtagggtgcatccaattttaacataacttcctggtctcctatgtcagattatacccaggaaggcccaaggaggatctgccatcttcagtccccattttaattagttcttcaaaggccagagaatgtctcacaggcacatcttgagaagatcatcaagggaatttgtgacattgtaataactatgcttcaaaataccactggaaaaaaatgattcatgaaagccaaatattagctaagctttgcatatgattttaactttctttgcttttaatacaagtaacagagcactagagtgactatccttacagggacaggaaggcccttgactcacaaaaagaacttgttccaaggcatacagctaattatttttattaaaattaccaaaggaggatgcaaagtagcttcagtttcttcttcaagaaggtataacttgcttacttgataagaattggagatgagtggaaacttatactttgtcagctaaaattaattcacactgcaaggggaaagtatttgaatggtatccggaattgctttaaacaaatacacaaagactgaagtacttatgaggaattttgtgagggagcagttggcaattctatactgattctctcctacactattttttttttagctctcctgaaatttcatgtatttagtttgctttggcaagattgtgtggctgaagtaatattagttttcttcctatgtatcttgctggggaggggaagaagaagaaaggagatgtgagaagaggaagacttaggattattatactgcaatcctacataataaaaatagtttaatcaaatgaataaagctctctttctttaaatatactgggatataactatttaataaggctcttcaaatgcgtaggctgaggtaatttaagcaaagtagcactggttgcataattaatgtgactattctggcctcaaaaacagtatttttattataaagctcattttcattctctgaatttgggaatttttttcacttgccgaagattgtttcacattgaacctggggtgaatggattcatcaggatagggataattttatttgaaagggtgtttatattttaggcagcccataggaatacctagtgagcagtacaatgggtattaaggtaacacataggaatcccagtttatccccttagtttatcggggtctgtaaccatgtgggccatcaagtaaagaatgaatgcttttgtagcaaacagattgctgtgtatattggataggacagaattttaaacaacagtcataagctttgcccttcagccaagtgaaaacaaaaatgatttgttcttcccttactgtgaatttctgtaactcctttgacctcagtaaataacaaaatcattttccttaaaaaaaagaggcagctatagaaactctataatgaacttgactttcccattctgttctggttgggataaagtgggcaagtatgggaaaatattttaggtaggtgcaaaagtaatagcggtttttaccattatgttcaatggcataaaccaccattacttttgcaccaacctaataacagtgatccaactgccttaaaccctcattggcaaaggtaataaggaggaatgtgagtgtagaggatagctggaaagagaatctacctatctttcctttctctttccccagcagaggcttaaggtgactgctagggtttgaacgtgtcccctccaaaatacaggtgttgaaacttaatggccaatgtgatagtgttagaaggtggggcctttaagaggtgattagggcatgtgggctcctcctttgtgaataggattaaggcccttataaaagtggtttcacacaatgttcagctcttgttcttctgccctttgccatgtgaggacacaacgtttctcccttttggaggaaatagcaacaaggtaccatcttggaagcagacagcagccctctggagaaacccaaacctgttagtaccttcatttttgacttctcagtctccaggtctgtgaaaaataaatttcttctctttatctattatccagtctcaagtattttgtatttaaataaaaagagctttatttatttgatttacttgattatatttgttatttagtccttagtctaaacagactaaaacagtgatgctctgtgccattccactgtcatgaggggatgacatactagtcaagggcataagataccctgccaggcagtctgcaaaggacacattaatagccacataactactttgcatctttttaattagataagattattgtgttgctggaagaggctctagaatttgtcagggacacttaagagtaattaacccagtggagaagtgaatacaaaacactttgctttgaacttgcatacaatttttacttagagtttatgttaatttgaggtttcctttggtggctggagtaatgcacattagaggagttggaccttgaagccaaatttacagagcaagcacagtatttatttagaacgtgtgttttagctgggacagactgcagtgagctattgcttctatgctgtcagccaggctagccctgggtgacgccactaatggtgagcaaactttttttctcttttttgcacctcataatcaggaatttatgttgaattatctcagtgctcacataattctaatttccatcttagctcttgtgctaccaaataataagctatatggcaatctgtgccattaaaatgtcaaggtgctttgtgaatcatccccagaagtttgttgattgccatttcttatatttaagcaaaaaggaaactgggacatggtgaaactaaatgttcctgctttaaagaactaaaattcataggcttacagctgaatccattaaattgcattaatgcattgttgaaacatatgtaattcttccaaaaagaattttaaaagaagtaaatttttataatttatttatagacatgaaagaattaaaattattttatagaaatgatgcatctgtattactctcccttatatgaacagcagctcttataaacctaaatggctatgaatggaactttatgaagtctaaaatatttaaatgttattcaacaaagcaataaaattatgaatgtgcaagggaaattatttttattatggggatttgtatgttggtaatgaatcttatagttagcaaattctcattaggatttctttaagttaaactgtccttttatttttttgcagtttaatttcttaaagactgaatgacttacattacatttaagggaaaggtttgtgagatggctggttattactgaaccgtagcctcagagtgctttcatctgctttgtacatttctttaaattttggaggtggaggcccctaatactatcattactgagacgttaatagaaagctacctaatcagtgccaaaagttaaaagcaaacattggtgaacacatatccattaaaatatgttttatctgcctgtcatattttcttagttgcatttcagtaataagcttctttacataataaaatggcagttgtatcctacagagtacttgtgaaatttgactgcaatgtaaatcactcttgcaaaatgccttgaagaaggatttgtttcccttagattctgaatgggaatagtattacatatctggtccctgtaaacatatctcacacttgaggtttatgattcttccaaatagaacttcaacaatgattcttccaatggaacttgaggtttatgattcttccaaatagaacttacatatctggtccctgtaaacatatctcacacttgaggtttatgattcttccaagtagtaatcatgaagaaattaccaatgttatgcgatcattttacacagttttaaagcaagatttcttaaccgtttttttacagttttaaagcaagatttctcattattgccattttaagccaagtgactcgttgtacggggctatcctgtgcactgtaggatatgtaggagcatctctggcatctatttgcctattttgacaaccaaaaatatctccatacattgccaaatgttcacttgaccccatattaaccctggttgagaaacaatatttgagaggaattatatcacagagggaatagaaaggtaagataaacacaagaaaagtactatccaccagaccctttccttttatctgaaaatggccaccatttgatcacttagtgcttttaataaccaggtgcttttgctacttagagtttgactcattcaaccttaaatgtaatccaattcagggcagaaagtatataatcataacaaggttcccaaatgctccctttttaaatcaattcaatcgccagaaatttcctctctgttcaccaaattaacagctactcaaggagctcctggttcagaaacaagaaagcagagactcactctttctcctcctttcctttaaatgtgactaacaacctggaaattgttcaacagataatgataaaaggactctgagatctggaaataagaagacaaactgacagcaaacctccgtactttaggaaggatactgcagtaagttccctgggttttatttcaatctcctatacacctccagaccaggcactgaagaggcccgcaaccaggaaccaccaatgggcatagacaaaagaattcaagaaaagccattttttctgtccaaaagaattggagatgggaagtccagcagacccctagtagggagccctaactcctactctgagaataaagggtgattctatctgttggcagcagcagcagcagcagcaaagccctggactatcccagcctctgccctacaattaggacactggtgggcactttaatctgcccacggtattggcagtagttatgtgactttctggtctcacttgtggattaagaagatccaagcccagcaactactgcttcccacacaagattgcccagaaagaacagacagccccagaaagcacattctgtccccctcagcgccatcaaggattgagtgggaagaaagacaatgcaaaaagaatgaagcaaaccagaatggcactgcaagggctcagaaaactgaactctcatgggaactaaatcccacagaactaggcacaaacctaccctctaaacctaaacaaggctgaatgctttctaaaatagaaaatttacaaaaaatagagtcttctagcataataagtgttcaggacaaaattaaaaatcatttgtcatatcaagaactaggaaaatcacaatttgaataaaaagacaatcagttgacgctaatactaaaacaaaccagatgctggaattgtctgaaaaggaatgtaaagcaattgttataaaaatgcttcaaaaagaaattacaaatttacaaatgtaatttattcaacaagaaattacatttacaaatgttttaataattaattatggattactataataaatttataaatttttataataaattacaaaatacagacaaatgaaaaatagaatatttcaggaaataaataaataaaagttataaaaagaaccaaatgcaggttacggaactgagaaatatcataccctaaatcaaaacttgccagattaactcaatagtataggatatgatagaagactgatagaacttggagaaagaaaaatctaatttattaaatctgagaaacagagataaaatatatggtaaaaataaatagaatatctattggcaatgacaaaatatctaatattttgtatcactgaaatttcagggaatgagaaaaagtgtggaaataaagaggtatttggagaaataaaggctaaaactttcttcaaattggtaagaaacattaacccactgaatcaagaagctgagtgaaccccaaagagtataattcaagaaaatccaccccaagacaaatcataactaaacttctgaaaactaaaagcaaaaaattttttagaaacagccaaaggaatgaagtatatcttacaaaggaataccacgataagtaacaacagatttctcatctaaaaccggatgagaaattacttctggatgccagagaagaaaatggagtatttacaagcactgaaaggaaataactgtcaaccctaaattctatatcaagggcaaatatccttcaggagtgaaaaggaaatatatatagtctcaggcaaaagaaaactaagaatttcttggtagctgactgatatggtttagctgtgtctccacccaaatttcatcttgaattgtaatccccataatccccatgtgttatgggagggacccagtggaaggtaatggaatgatgggggcggtttcccccatgcttttctcatgataatgagtgagttctcatgggatctgattgttttataagcgtctggcatttcccctgctggcactcactctgtcccactgccttgtgaagaggtgccttctgccatgattgtaagctttttgaagcctccccagccatgcagaactgtgagtcaattaaacctctttcctttatcacttatccagtcttgggtatttccttataacaatgtgagaatgaactaatacacagacctactgatagtggcagaagaccaacaaactcctaggcagacagggatgggtccccagtaaaatctgaccttcaagaagagatagcctgaagcctgaaaactgagctgccatttctaggtagagtctaggattggagtgacaacttccttgagaacttttagccaatcgaatggtgctttttccaggccctgcccatggaccaatcagcatgcactcccccattctgagcccataaaaatccctggactcagccacacagactgaaagctacctgctttcgggctccctctcacagcggagagctacccactttgggtcccctcttgtgcccagagcttttctgtcactcaatgaaattcttctctgcctggttcacactctggtgtccatgtatttcattcttcttggtcatggtacaagaacctggaacctgccacatggcaggtgcaaaaagaactataatataactccccattcactaagctgtgggcatcaggaccaaatgagctgtgacatactcctgtttgccaagctgtgggtggtgggaacaagcgagctatgacatgcctctgttcaccaagctgcaggtggcaggaacaagcaagaattgtagcatttcttgggggcttggacctcgggaatccctaggcgagagccataacaccccttggggctacgtggttgctggcatctccaagttttcaggcatcaccacgattctctcatctagacgccagtgcccaacccagaggttgcttgcagcatgcccactccagccatgggttgagcacagatcctatggtgagcgcaggatctgggctgcgacaccagttgagcccagtctgctgggccgagtgggcagagtgagcctggtgggcccgaaatacgccccaggcagaggtcatggtggccccagagatttccagttgaggaagcagcaccaaaggaattctgtaacactgtaactcttgctcctgattgctgagctacaagagtgaaaaaagctgcttgggtgccattccctctcacaagccaaactacacaaaagccgcaacatttcctttaaagaatggctgatggaagatctccaaatacaatgcaagtgataacagaagactgaatggaaatttcagaaaagaaagaaaaacaatgctataggtaaaaataaaagtaaatagactatcctcctcatgaatttctttagtcatatttcatggttaaaataaaagttataacttttatcataaaatttatagacaaaaactttatgtggtccccaatgtatgtagaagaaataattaagaaaactgcatataaacggtcagtaggataaagagatttaaatgcaaataaggtttttacatttcactcaaagtggtaacatgttgaaacaaataggccatgataatgatatgtgtatatggttatacataggaaaacactgagaaagctacataaagcaatatactaaaaaacataaataaatcaaagtgaaacactaaaatattgttcaaggaacccacaggaaggaaagaaaagaaacaaaagggtgagaaatggagggaagaaacaaaaaacgaataataacatagcaaacataagccctaatataacaaataattaattaccttaaatgtaaatggtataaatataccaattaaaacagcagagattgataaggtggataaaaacaactgtatgttgtctacaagaaagttaatttaaaaataacaaacataagcaggttgaaagtaaaatgataaaaatagatgtatcatacaaacattaatagagaaatcaagagttactatataataccagataaagtaggcctcatagtaaagaaaagtactgtggacaaaatgttgcactatagtgatttaaaaaaatttattcatcaagaaaatatagcaattgcaaatgcgtatttaccaagccagagagtttcaaaataaagataaatctataattgtaattggagactttaatacccaactcttagcaattttaaaaccactagaaagaaagtcagcaaggatattgaagaactgggggccaacattaatcaacaagttgcgactgacatttatggaacacttcacacagcagcaaaaatatacacaatattttcaactgcttatatacatttaccaagatagagcatattttgagtcttaggcaataaaaaagacttgaaatgatacacagtatgttctttgaacatagtggaatcatggtagatttcaacacctaaaagacaatttaaaaatcttcaaatacttgaaaactaaataacatacttttaaataatctgcaagccaatgaggaaacctcaaaaaatgtttaaaaatgcataaaaaggaatgaaaatcatataacatatcaatatttatgtaatacagctaaaacagtactgaaacagaaatctatgttactaaatgtttacattaaaaaagaggaaaagtctcacatcaataagaaactagaaaacaagaggagcaaaataaacccgaaagaagcagaaggaagaaaaaaataaagagcagaaattcataaagttgaaaggataaaaacaacaaaataaactgaaacaaaaagatggaactttgaataaatgaagaaaattgataaacttttactgttatcgataaaactagcagcagataagacatattttgccactgtcggaaataaaatggaatatctctacatatcctgcagccctcaaagctgcataaggctgataagggaatactaggaacaacttttcattcatcaactcagcaacttacatgaaataaaagaatgttttaaaaacaaaaattaccaaactcgaccaagatgaagataaccagaatagtcccatactgattaaataatttgaatttgtaatttacaagatcccggaaaagaaattccaggtgattgcactagagaattttaccaaagaagaatggacaccaaatttacacaatttcttccagaaaatggaagaagaggggatactctctaactcattctaggaagacagtgtcaccccgataccaaaactagacaaacattacatgcaaaagagagaaatgcatacaggaacttagatgcaaaaatcatcaacaacattttagtaaattgaacctgacaatatataagatcaatgatatactatgaccagaatttattccagttattcaagtcttgcccattacttgaaaatcaatcaatataacccaccgtatcaacaggctaaattagaaaatccatatgatcatatcaattaacacccgagaagcatttgacaaatgcaacactgatttatgctaaaaactctcagagcagcaggaataggagggaactttctcagcctcataaggaatgtctacaagttatcaattcttaaaatcatatataggtataacacagttcctgccaaaatttcagcaaggatttttgtagacataaacaagattattataaaatgggtacagaaagggaaatgacctaaaatagccaaaatattgttttttgtaaaaaaaaagaataaagtagaagaaatcacacttcctaatagtaaggcttactatacagctacagtaacaaaaacaatgtgataccagtggaagtacagactcatagatcagtgaaacagaatagagaacccagaaatagagccacaaaaatatgtccaattaatttttgacaaaggagcagaagaaattcaatgaaacagtgatagcctttttagtaaatggtgtaaaagcactggacatctataggcaaaatcatgaaccttaacctatgcttcgtatgtcataaaaaactaactcaaaatgtctcatgggtttaaagataacacataaaactataaaacttctaggaacagaaataggataaaatctttgcaacctagaattggcaatgaattcttaaacttagcacaaaaagtaagattcataaaaataaaaaaatcaactggacttcaacaaaattaaaatcttttgttctcagaaagactctttaaggagaacggaaaacacattacaggttgggataaaacatttgcaaatcatgtgtctaacaaaggacttgtatctagaatatacagttagctctcaaaactcaacattcaacaattagaacataggcaaaagacttgaaaatacatttcactgaagagaatgtacagatgacaagcatacgaaaaaatattcaagaacattagtcattaagaaggtgcaaatgaaaagcaatgtgatatcaccacacatctatcaaaatggctaaagttaacaacaaaaaagtgacacaccaaattttggtaattatgcagagaaagtgtgtctcttatacgttggtagtagaatgtaaaatgtacagccactctggaaaatagtttggcagttgcttttaaaacaaaaatgaacttacatgatccagaagttgtactcctgggcatatatccaagtgaaatgacaacttatcttcataaagaaacttgtataatagtgttcacagcagctttattcatggtagccacacactaaagacaattcaaacatctgtcaatgggtgaatggttacgtaagttataggatattgcatcatgtaatattattcagccatgtacaaggagaaaactattgacataaacaacttggctaagccttgaggaaatttgtggagttaaaagaagccaatctcagaaggatacagactacataattccatttatgcaacatttgtgaagtaagataattatagtgatggagagattagtgtttgttgggagttggagatgggaggtgagaaagtgaatgaatctatagagaggtgacgtaagagaatttggtgtttcagatgcagataaatatcttgattggggcattggttacatgaagcgaaacatcagaaaattgcatagagcttggcacacacatacatacatgcacaactgagtgtatatataaacttgtgaaatatgaattcactctatggcttgtaccagtgtctatttcctcatttcagtattgtactatagttatttaagatgttagcactggaaaagactgagtgagagcacacaggacctccatgtacatttatttgcaactttttatgtatttataattatttcaaaaatttttaaaaaaaggataagtaaccatagaggcaaagtaaatgatcagtaatttgggcatatgtaggtgagcagcagccaattctactgctggttgccgtattgcaagatggtagattgaataacacctctttctcttcctggtcacatgagtgtcaccctcattgtctgctcttgagaaattccttcccttcaccctcaattactttcaagtttgctatattgggatgatttttgatacggtaacctaggtatgttcattctaagtaacattctctctactttctagaccttttcttcttcctgctaactagggcactgcaatattgaggtgttacaccaaaagttcatctctgaactaagaacaacaacaaataaattgctttaataagagaaattccaaacacaatagcttaaataaaattttttttttttctgttgtgatagtttggcaggccaggtcaggaggagcagctcagctaaatgaagaaccagggacccaatttccttcagtcttgttcctccacctgttccttgagtgcggttctttgtatgattgtagctgaattactgctctgtgttccagtccccagaaataaagggaaggattttccttctaagtaagtaatacatgggtggcatacatcacttccatgcatataatggaatattattcagcctttaaaaagaaggacccggaagttcaaggctgcagtgagctgtgattgtgtcactgaactccagcctgggtgacaaagccagacactatctcaaaaaaaaaggaagaagagggaaatcatgccatctgcaacaacatggatgaacctggaagaaattatgcttgtatgtggattcgaaaaaagttaaatttctagaaactggagagttgaatggtggtttccagaacctgggagatgctgtaggggaggggatgctgggtggatgtatggaaataatggggaagtaaagtctgaaacctgacatacagcactgtgactatagttaacaatattgtgttgtatcacttgtaatttgctaacagcaaagatcttaagtgtttgaactatacaaacacacccgcaaagacagtaactatgtgaagtggtggatatattaatcaccttgagtgtggtgattatttcacaattatacatacatcaaatcaagtcgtatactttaaatatataccttaactgtcaattatactgcaataaagctggaaaaaaattatattttagcagaaaaactagatcctaggtgtctacattctgtgtgtttggtaacttattataagaacttctgaaggccattgaaaaggggatgggattacttacttagaaggaaatccattcagggtaagtgagactgcctctgagcatttcggagaggaggcaggccaagaagtagacaaaagagcattgaggagggtggaagaagccccgctcttggccccacccccgcttttcgtaggagtaaagacgcggggctaaaggctccaaggaaaggcagggaacaggtagtgtggcaaggggaactgtaggcagtgaaagcagggagagaagaagcatctctgtatctccacactgggcctttcctccacagcattcacatgaaggaatgcaaaacattgaagcatctgtaagtttgataccctcacaatatggctaaatgccaattcttggcacagttgggcaataacctaggaattaaaaggagagataataaaagggcaatacccactcagttggggttagtgagtgctatatttctccagtctgcaattgagacacctcactacctagacaagaaaaagacactgcagagatttattcctattctccacccacttcctttctacattgggactcgccccctcctatatttcatttctgttttaactcaatagatacgcatcagtttttaaacttttttacttttcactgagttcacacatatggaaaatatttcaaggtaaaagatatgttttaagttaatttttaaaaatacctattattataatagaagccaatttcttgtctttgcataagttattgtcccagacagtagagcttgagggagctcagaaagattttttaataagtagcaaaagtagaaagaaaataaaatggccagaaaccctggtatgtttgctgtaagcctaccttgcagcttgcgcttgctagctacattgcaagctcacctagaccacattatgatcacaatgtcaccattgatgctaacgttcaattcttctttacaaactttacatgatcaaaaccacatgggcaaagaagatgatggaagaaattaagttaaaaaattagaagccacttttttaagtcacatgaaagatagcagattggcagaaagcatttgatgtttcagcccctgtagacctttgtttgaatcaatgccaaaataaagacagcacttagaggatttcaagttttgtcaactctctaggaaacatagcaaactgcttactctgcacgtaagttaggaatggaaataaaattatttaaaaagtgttaagggaaaccgttgtattctggggtagaatacacaatttcaagtttaattgggaggtcaaggagaaggaaagaaacaaactcaaaatatacacgtgcagagtgcgttggttatcttacaaataccatcaattcatctcagtcttttattataaaacatgttgactaaattaatgagaaagattgagcagtttcttcaaacttccgtgaaagaccaaagcatgaaaaacatacaaagctgaaattcttgtgatgtgttgtaaagattttttcattactcacaaagtagtatgtgtaacaagatgtcagaggaaccagttgaagtaaatagaaattcaattaaggaagaaaagaatgaaaggtttttagagaagcagaaaaacaagactgcacatagaagtgcgcagtgaagcctcccttctcattaaggcaattggtttactgtccctgttgtgctttatactcatgccctcctcagaataccttgttcacatcgtgagtcactgtgcactagctctgtccatttctgctttaatcctgtgggttctttcattttaaaatgactagtgatgcctggcatattctatcctgacttgttcaagatatccctgaagagctcccctcactagccacatagcagcataaactagggttgtatattcacttattgctaagattttagaggaattgtaatgaattcaagggtaaggcattgcccaattaattaaaggtaatgaaagtgaatgcaaaacacgagagtcgatcatcctcattttactcttccccctggtttctcctttgagtaggaaaattggtcagggtaccatgactacatcgatgctgttttgtgagtgggaatcagagtatttctcctctcctctcaccatagttcctttctttatacattagtttgaaggcagcatattcctgtaataatctgttccagaaacaagaattaggtattaggaggaaaaaagtgactgcaacagaataggaggcatcactctgaaaagaaaagatttgttgtttggagtaagatagaaaaaatgacatcaacaatgcattccaaatattgtaatttcccaaacacttatgtcagatatcattttacacaagtggtttcatattgcttaaaagcttggtagacagtgaaatatgaaaacatattcatattcaagtagagaaagagtagtgtttatggtaacccacacacattctgattattggcaaacattcatatagataaatctcccttttgcttgataatgagtgaccatataaaaaaatcaaagcaaaatacaaaaggataagaatctacaggaacaaactgtccaattaaagaatcaatggaagaatttgacctgcagcgacaaattgttcaattgatccaatatatgtaaccgtaatctgaagcctaagaaacagtacagtagaataaataaaaatgctggatttcagaggaaggacacatttttgaaagtgttctcttccatgaaaccaaagacgatttaaagaaccaatttggcatcttcaataagatgcacagaatagggattgggctgaacctatgggcatggtgggctccaaaatccaaggcaggtagttgtggttgagacctatgctcctgtagttagtgttcccttgcaagtatttcatgcaagacggagaccagaaacaaaaccatggcctgaagtcaggttgtagagaggcctaagttacctctgagaggaagctgaggctgaaagaaatggaactatgttgttggctagacagagtttatagagtcctctgggctcagggaagtgaaaggaaaaaggagtcttctacagtgaattgatctgacttatttttatcaccaatgtcactacagagctgaagccaaaacaagaaggcagggagagcccaaaggaaaaaacaaaagaagaaaccctgaaacttctgtctcaaaatgaccctgagagccaaagaacatctatcgctaagaatggcagccaacaaaatgaaaactcaaaatatgaattcactccagataaaagtgacttttttggaagagtttgacgtagactttgaaataagcacattcaggataatcaatgaacaaaaagtgagcattataagagaacaagaaaaaataaagaaaaaaagacatgaaataactacatatcaacatagaaagaatcaattttaaattgtcaataaaattaaacagcctattgaatgattgattaaaaatgaagaataaatttagtgtttccaagatgtactaagaaaaattctaggaaaagagaatggagagattagccaggaggctaactttgaaaattataaaaggagtattttgggtgtttttgaaatgagcaaacattagaatcttcaggtggaattcccactataaatactgatcagagagaaaaatatattactatgctcattaataagaaaatttaaaatcacagaaatcttcatggcagagcaggcatagtaggcatatgcaagtcttaggcaagtgttcattgcatagcaagcagtgcacgtcttagcaatgcaagtcctcccgaatatatcttagatataattatataattccaacccaaatcccagcagactgtttatcttggaacttaataagataatcttaccttctttatgttgggaaaaatgtttcccaaggactccttccctgtatggttccatgtttgagttgtccaaaagaggattgcatgcaaaatttgaaagatgggagcaaacaagcagccattactttctgaaggtgaccataatgaaatgcacggacagacagacacaaaagtgcttgtctttattctcctatgctttgtgtccagctctttttttttttttttcctggctgatagccctggtgaccatgtgtgactccaggttaccaaactcttaacatggactcaaagaggtaacagcttctccatcaccttcctcttcatattccaactttggaggtgagatgtgtttggcctctaggccgatgaactggaaatttctcttattctttagcttcacctacttcagttatttattgctgcttatctagctattacccttactctttccaacattattttgcttgcaattgtgtgggtaaggaactcagaaagggctaggcttgacaattctcctctcactcaaatggtggttactagagtgttcacttgcaaattgttgccactcactcacatatctggtgccttgggctccttctctctttatccatgtagcatctcatcttctgaggactcttcatatagcatgggcttttcacctgatagtcattctttacatagtagctgaattctaaggagcaggaagcagaagcaaccaagctctcctggctcctactacattttctctcacaggcatttcccctctactgttttgcatgtttaattttgtcttagtatctgtttcaaaaaggttcaggaatagtatagacttcatgccaataaatttgacagcttagataaaacagacatattccttgaaatacacaaaaagggaaagcatgtctaaaacacagatgtgatagttaatattgagtgtcaacttgagtggattgaaggatgcaaagtattgtccctgggtgtgactatgagggtgttgccaaaggagattaacatttgagtcagtggactgggaaaggcagacccgtcctcaatctgggtgggcacaatctaatcagctgccagcatggccagaataaaagcaggcagaagaacactaaaaaactagactggcttagcctcccagactacatctttctcctctgctggatgactcctgccctcgaacatcagactccaagttcttcatctttgggacttggactggcttctctgctcctcagcttgcagacggccaatgtgggacctcaccttgtgatcctgtgagtcaatgctccttaataaactcccctttgtgtatacatctatcctgttagttctgtccctctagagaactctgacgaatacaatagataacttgaatggccctaaataaataaaaaaacttacattcatactttaaagctatcaaagaaaaggacagacacaggtagattcacaggtgaactctgccaaacatttaaattatgaataatcgttattctgcacataaggggggaattcccaactcattttataaggccatcatcatcttgttatcaaaaccagacaactccactacaagtagagaaaccagactaattgccaattaatatatacatagaaagtctaaacaaaattttagcaaacagaatccagaaatatacaaaaaagataatatttatgattgttaattttatgtgccaacttgacacataaaattacagagttcccagatatttgtaaaacattattctgggtggtgtgtctgtgtgttttggatgagattaccatttacactgataaacttaataaagaagattgctcttgctcatctgagtgggccacatacaatcagttgaaagcctgcatagaacaaaaaggctgaccctcctccaagtaaggataatccctgctgccagactgcctttcaactggagtatcagtgttttcttgccttcagccttgaactaaatcatcggccattcctaaatctctgtacttcatcaggtactactgtatagataactcaagtaatttttgtattgtaattccaataattagttaggcctgacatgtagctcagataatcaccataagttttctctcttctgaaaacatttgaggcatacaagatatcagtgaaaattcatcacttttgcagtgaacaactacccaatttgtattatgtttctagttacactatgtactactcaacaatagagctgatctttgaatatcagaaatatacagtgctttccttgtagttttgttattccatggaactgtaatattccctgtcaagtgtatttttcatccctggacagtaactatgtctttaatttctctcattggatgtaaaagtttatatgtgcatgataatgtgatattggcaaaaggatttttttactaagataatttgaaataactattatatatacgccatataatgcttccacgaagataatttgaattaactattatatatatgccatataatgcttccactgtttttattaacaacttatttaaatacagaaatttcatgatattacaaggtttctgcacaagaaatcacatatatccgaaacttgttcagctgtctacagcaaagattcatttttctcttatcgttttgatatccaaaatgttacccggcatgtatatcaatagctctgttactatcatatgttgttcttgtttgaacacaggcactttaaactgttcaaatttcagtaaaatggtgcctgtcatctatttttatattttaagaaaacataaatgtattggaaccctttgttgctgtgaagttgttcccctactacacgtgaaattgagtgtaaatattgtgaactattcaatttaatatggaatatttatgaaacatacaaaattcatatttatgatgagcatattcattcagatcaaagagaaactttacaggaattgataactgagtgcaatgatcacatttgtcagggtctaaatgaccagtagtaagcttgctatttgtgtttgaagttcaactcccaatctaatatctcagaaaactgaaatttcttttggaaactatttcacattttaactcaatttctccatacaacgtagttagcctcaagcctatatcatggtggggcaaattgatcccatagaaacgactccattctgacaaaaacaagaagaccaaaccactgctttctaggaataggctcagatttttttaaatcaatgcttaaaaaagtatcaagaccttaaaccagtaccgcgctgggctggttcctattgggttgcaaaagtgattgtgcaaatcttttcccaactttatattcagggacactatgcctgatattggttgtagtagaagtattaccactgtagagtttggcaaccgttacaaatcatggcttttaaaaagataagtgtcccacaaccctaatccaagcttcttagactagttttcaaaattgaaccattcatggtaaatacagagaatgtataagtgattgattatataaagcaagtacaatcacctttataagaaagaaatgacgtatcacaaataactagctcttttaggattgtgtcacacacctatccatgtgggaatctgaagagttgattttatatatagacttgtcaactttggaataattagatgccctatatggcatggtgtagttcattgatttttccagaacaatgaggtaggtaataaatgtgtttaaaattttaaaaactaaagaaaggaacattagcaaaacaaaaacaaaaacaaaaccacaccctccttccctcctttctaatgtgcagggtatttatggaggaaagtgtggtaatttaattagaatttacttattttataaaaatgttcaattctagaagaaactttgctttcaactgtgtgtagtatgcatgagccattttcttttgcattttcaaaaggcaaaacagccagtttaatgttctcctacaagataaaaatcatttgaacaacatatatctaatcattgtctgactactcatcaactgcaatcacgtcctgacaaccttactttatttctcatctgcttttaacaccacttccttcactgctagtccaaggattggcaaacatttttttgtaaagaatcggatagtatgttaagctgtgtaagccaagtacagactttgtgacatgcatattctattctatttctcttttcttgtcttcttaaaaggaaaattgtttaaaatcctttaaaaatgtaataactggcagtatttaacctgtaaggaaagcatactttggttatctctatctaatctagcattttctattgtggcatgcgtattctattctatttctcttttctcgtcttcttaaatggaaaattgtttaatatcctttaaaaatgtaataactggcagtatttaacctgtaaggaaagcatactttggttatctctgtctaatctactctcttgtgcccacttttacttactcacgtcttttcccaacagcattctgtcacacctcctaatagttttgctcatcattcctgccttttgtccgagatactcatattctcccctattataagcactgcacattctcagattttttattttgtggtcaaaacacatataactttccactttggctatcagcctttctttcattgtttctttttcatcctctgccaacctctcttttaaatattagaaagtatcctagtttctattttgtggtgacctattctgttattcttgcgtgtaaagtgaattatttacctctctctctctttgattttattcgttacctttcttggtttgctcttcattatttatctctcttcttgtagaagtctatcttgtttcctcttctgataattttcctctcctatgcttatttttgtttaccctttcacatcccatacaatgtttctactaacagctacacaacaattccttcaaagaagagctctcaataaaaatgtctttatttattatcattgctttatacataacttctgtcttttacgcttttccatttgtagaaagaaaacacacaatcccatgtaaatgcttctcacttttctttaaatagcattaagattttttcttatgagcatccctgaaaaaccgcataaatgcttagcaaattatgtgaaaaaaaaaaaagatagggttagaaatctgctgtttaagcctccctcagatttttcttttagagatattttcctggaaggccttggacatttattttaaatgggggattgttacaaaaagaaataaagcccatttaaccaaaactagagaataaaaactatccccctgcataaccttaaaagagcacaaagaaaagctttggttttgaaaatgtgaataattagtatactttaaaatttttcacattattctgtatacattcatacagattcaaatagtattataaaatattctcacaatttttcaaaaatataaaatgtcttataaaaaagtgagaaagtttttattttcaacttatttttatatacacctttaagatattttctttagcaaatgtttctctctaatttgaatggatgtttactgaataaatcaaattggttttgcttcattgacattactataagcgaattccagtaaatttaagaccacattttatgaaatgcattcaaatagaaaagtctattatgttatcagagtgccctttgaacttattttaaagtttgtgaaaagtaacgattacctttttttaaaaaaaatcccaagtctttgaggaagcacttgatgcgacacattttaagaagtaatgagaacaaaaaaagtgaagaatggcctgcttttcaaaacagcaatttattggcctagataagaaatggattttaaacttgataagatttttaaacttagatgattaacatataatcatcttctaatagacttctattactccatctgagtgtttaatgtgaaatctttgttaaacacatttacgtgataaatctccaagtgccacttatcttctaaaataagttgtggtacaggaagttcacattctctttcctctagttactgaataaaagcacatatttcaaattttctcagctagttttatgcatgagaacttttctgtatattattaaagccatatgttacaaaatggctatttcaaagtagattaatagattatgtaatgcataggtctaaatcatattgattttaattattttaacatttcccattttaatgttttctatttaaacttagatattgactaatatacattcacttactttctcttatacttaagatgctttaaataagaaatatggaataatttttcaaaataattgaatttgtttcatttttttccttttaagcaatgttatccaaagtaatttcctaagcccctctgaataaagttgtctacttaggcttattttggaattatagaaaattgcagatagaagcaaattaaaaaaagaagattaaaagattatactggggagggatctgaaaagagagggagatgaagatacggtaatgatagtaatactgtattatactaacattaggatggaaggaccggggtccccaagcttacatagcctctactttggcacaggacattgtgttcagacctcaacagaaagatacaaaactatagacgattataatgtgtcattaaatgagatatgcaccgagttgtttacaataatgatatgtctgagataccaatgcacttctaagtatttttcccccacaagttttactaaaacacagctttgttattacctaagatggataatttctctgtaagaagaatggacctgcttattagtaacatctccaagataaactgcatctaatgctgccttaccacatacactgtttttgttcagcataatcgtaaatatgagcaatggaacataatattaaatatttcatgcccagcacttaaagaagagtgccatcattttttaaatgtagaaaatcaaatagagacaaatgctgcaattattgtatcctacaaataagttaaagaactgacattaatgttatggtagtctgtgtctatactccccaatgcattgttacaggtaggtagataggcatgagcagggggaggagaaggctcttctcccctacccactaggaatgtcaggtgatggtttgacaattatcacactgtctctccaaaaataataattcagcagccggcacaaaggctccagggaaagacagtctcctgataatccacagctataaacataaaagtcttaattgaacagagatgccagagagaagcaacttcctggtcatgtgcattaggagacaaaatggcggccaggaacggtggctcacatctgttatcccagcactctgggaggcggaggtgggtgaattacttgaggtcagaagttccagaccagtctggccaacatggtgaaaccctgtctctactgaaaacaccaaataaataaataaataaaatagccaagcgtggcacacacatgtaatcccagttacttgggaggctctcacttgcatgctgtcacttcccaatggtaagaagggcagtgcacatgtgggcagcccagcctaagggaagaatcatgggaaacaggagagcctataaagtcctagaatcacagttaaacgaggcacttgaccttcagacacttaaccttcacatgcctgcttgggtcttttccaagcatatcttcctttctttcctgttctaaagcctttttaaataaacttccactcctgctctgaaactcacctgggtctcttcttctgccttatactcctcagtcgaattctttcttctgaagaggcaggaattgaggtagctgcagatctttcctctggtaattccagtatggtgaagacagtatgggtgaaaaataaatttggaagttagcacccatgtgtaagattttcaataactctaagtgctgattatatgtatttagcaaagtaaaccttttatttttgttttaacttttttgttgttatctagactgaaaacaatgctcttctcaggacacattattaagacttctaagacgcttctctatttataagaagaatacataaatgtctactatgtgagtcactaattaacgaggaaaacaaaattacagctcaattgttcaacctattttcgattttttagtttccgcatatttctgtcttttcaaccattgccagagcttcacaagagtaatttgtgtgcatatctgaattttgtaatcaacttatttttttaaatatgattttataatgctctttcctataactcatccactattgaggtgttaaatttccattcctaagactgaccgttatgaagtttcccattctgactacagccgagcatttttcctttctttcgtgacatctctcaatgaatatgcatccccagtagaatgtttattgaaaagcttttgtccaaatgctatgcctttgctcacgtcatttcccatgcctggaaatgcttccataagggattctagtccaatcgtatctattataaagagttagttcaagtcacatttaactctgtcaaagtctttccatgttggctccttgtctataatgtctgaaatctagttcatatcaaacgacctattagatagtttaacctacatttttttttggagttatgtaactattgctgttaattgtctttttatgcatttacacaagggattgcagatccaaatgtccatggtggtcaggttggtaatttagtgactaaatcagccaactgtaatgcagtacgcctacactgcaacaatgggagcagctgttgccacctgcagaatgtgccaaggagcagccatttctcagctccagtcaattattgttctgtagaaatgcaaggctcattgttgccagatgtttgtattataagtaaataaacaagaaagttgactttttaaatgtaaaatcccctgaattttagaagttgtttcagtttttaaaaacattataaaactcatccagccataggctgcatgtatacaaactcttatttatattcctaatccattcaaccacacatttaacaaatatgtattgaatactttccatgtatcaggcactgtgcagatcacgaagaatagtggtgaataagataaagcccctcttctaaaaagtgtttacagtcaaatgtgaacatatgctacaacatttttcagtcagacacatcctgatacatattaagtattttgatttgatttagcaatagaacaatggctaatattagaaatctaacatgctacaataaaatcagaacaaaatagcagaagaaaaatcccataggaaacaatgaagataaataaaataataaacagctgtcttttctcttcatacacgtacatacataggcacatgtggatatgaataaaatagaccagacaatgctatattctaacaccactaaatcttctgtcatgctcaactacaactgcaaaatatattgagatgtgaatattgtgctccaaagcaatattctgcaggaatattactgtattctcaccgttgaacagatttcaacaaagaatatctttgtgacatttataaatagtctatggtttttttttcaaaatctcagataaggtagtgttgaaacattgagtagctttactaatgagatagttttcaatacaaaataagtaattttaaaatgttttatttaaaaaaaaagagggaatcagtcacctacagagtatgaaagtgaccatattccccagagagtttaaatttacctttctggactggtcttttctgaaaataaggaacatatttgtgaagcattaaaaaaatcttttgcttccataaatgtatgcaatcctttaacattgttttattctgttttttttaattactcattttcatttcacaatgccctacaggtctatcaggtgaagtagttaacaaataaacaaaaaataataataatggaaaggaatgagaatggggaagaaaaagacacatttattatatactaaaaaagtattggttgctcttttgctccttcccttccctcaccttccattcttcctcttcatcttcttctccttcctcctcttttatttcaaatgatccttcataagccaaaaaatgggttatatagaaaattatcttaatttatctctcacatttaagtgctggaaaatggtttgtaagtttgattgatgcagaatatttaagaaagtaaccaacaactaagtctgtttattgaaaacaattttgtttcacagatcattataaaatcaaacttaaaatgcaacaaaatataaagactgtatttattacacaacaaaggggtgaaaaatgctttcatcttctttagaatagttgcgtgcagttggattacagttagaaggtcagcatctcctccccaatggccccaaatcagttctgatatgaagagctggaaacagacaagattaaactctgattacttctttgaggatgagatgtttttaaatcagagttggcaaaccctgccacgagtgcatctgtcagggatcaaactccgttggcattaaggttcattctaaaacccaaaatgtacttcattaagtatttctctttaaagcaatcatactgactctattcatagccagagcataaggttttgaaaggtgttaatgatcagttttttaaaaagttctttgatgtctaaaaaattcttgaaataagatcatttaaaattaattggaagtgaaatttactaaaggcaaatgttcacacaaatcaattagttcagatttgatccctaaagccaaatccacaatttctaaatggagtctaaacttcaaaaattatttctccttcccctctgtagaataatttgagacaacaatataaaaataagatgatgtaattagacttcaaatcccaaattcacattgtaatattcatgaggtgttcctagtttctcaattcttcttgcattaaattataaatgctcattaaccaagggaatgagatgcaaggttttcagccttaaagtgaaaaaggtcatctaaaccactaacagctgaaaacagagactaagaagaaagatgtatttaggggttgaataatacgtatttacagaggcctacagtgtactctgcagttgagattgctggaatctattgaaagattcagggattgagcttatttacctatgcagaaaggatactgaaaaaaggaataataagaaatatggtcggacacggtggctcacacctgtaatcccagcactttgggagtccgaggcaggtggatcatctcaagtcaagagttcgagaccagcctgtccaacatggtgaaacctcatctctactaaaaatacaaaaaaaaaaatagccaggagtggtggcaggcacctgtaatcccagctactcgggaagctgaggccggagaatcgcttgaaccagggaggcagaggttgcagtgagccaagatcacaccactgcactccagcctgggcgacaagagtgaaactctgtctaaattaaaaataaaaataagaaatatggagaaaaatcacaataatgagttgtagaagtgttaagcataataatagatgttctatatatagcataacatgtattgttcttaagcacttactctatgctagaccctcttctaagagctaatgcatattgatgcatttactctgacaacagccctatgtaaggggaagagacgatcagagaggtgaagtacttgcccacagtgactgtcttagtctattgaaggtgctataacactttgaggggggtgtttataacataaacctagagggggtggtttataaacaacagaaattaatttctcacagttctgaagactgagaagctcagcatcaaggcaccagcagatgtggtgtctggtgaaaacttgcttcctgcctcatagatggtgccttctgactgtgtcatcacacggtagaaggggcaaatgaactccagtgagcctcttttataaggtcactaatcccatttatgaacactctaatgtcatgaccttatcacctcccaaaagtcccacctcctaatattctcaccttgagggttaaaattttaacatgaatttggggttgggtgggtcacaaacattcagactatagctgtcagtcatcaaaaatgtctagccctggattgaattcttaatcaccaaccactattgtattttatggagatgcttctctataagatggctagctaaaccccatagtaacatgaagacagtgggtagctacaggttacttctgccaatatcactgaggcatcttgtgcttagaaaattttgtgacttgtatggtacatatgtattacagttttatatctaggttacagaagacggattttacaccttctggccttctttttcatctttaagcctatcgtgtctgactcccattttgttgtgtttccactcctagagttccatgttttccacatgttggaaagaccttttcattgtaagattctctatcagagctccttgggcagagagggtgacctgtcactttagaatgctctaaaccagagtattcagggccttgggaaatgaactttattttccataacagttatcaaaaaaagcttagtggttcaagccacttaaaagaaatgtggtccctgcccacatggtgtggagataattgcctcatctctgccgtggtgtctgctgaccaaagctctcctttgtaaatctctgcatgagtcccgcagtgcagccacaagcatggcacatgttttttatccataaataagaggaatccccagggctctgtatggcttgcaataaactcaaaattaactatgattttagttcttaatattaaaaaggaaagaatgagtggaggtgggagtgacaattcagtaggacacaaatgacaagagggagattcttttataaactggggtttcctacaaactaaatttctttctgttcagaaagtccaataaaatatgaacattattgggaataaaatatcagcataaggccgggcgcagtggctcaggcctgtaatcccagcactttgggaggccgagacgggtggatcacaaggtcaggagatagagaccatcctggccaacgtggtgaaaccctgtccctactaaaatacaaaaaattagctggttgtggtggtgcttgcctgtagtcccaggtacttgggaggctgaggcaggggaattgcttgaacccgggaggcggaggttgcagtgagccgagatcgcgctactataatccagcctggggacagagtgagactgcgtctcaaaaaaaaaaaaaaaaaagaaaaagaaaaaagccagcataagaaatacaaatgatttctttctatctagcttgagctatcaaacaggacttcagttttctcttcagtgggagggttgatataagcggaagccagtttgaaccctacctatgccaatgtccttattgtggactttggaagaaaataacttaaaagtgacattaccgttatggagtagtaaaaaatatttgagggcatgttaatcattactaatatgtatctcacaaaaatgtagacttaactgaaaactcatcaatgcaatttttttaaaaaaacataaaatcttaggtattcaagttccattttttctgttttaaactaatgtttgaaagcatcaactactgtttcttaatatgttatatactcttatggaaaattcaaacccagaactttaaaatgatgtccttgtttattgacaactgacttcaggaaaaagagaagcacatctcaaatgcagacaacttcaagttcttccatttcttctttacacatctgaattttacttttctttttatatatgaaagcaacccaagatcttttccaagaatttgtagtcagcagggatgaagagacttctgacactcatgacttgtgagacctcatgacggtcaaataaggaagaccttgctgtattttttaaggatggaaacggccaagagggagaaggggagctttgtactgatagtcaaaaactttgttacaaatgagaagactgacacgatgtttgccataggagtcatagtatttgttggggtggcggggggggtggaaaaaagtaaaatattattagtctgctgagattttaactgtttctctgactggcattctgtatgatatgtaatcatgtctataatgaggactcctttctttatctacatgagcaattctccttcccaggtactgataatttcaaaatgaaagccatgtacatactctgttacattaaaggaggaagaaaacacagaatgcaataatattctgccctcagatgccctcatgatctctccatcccttcctctccttcatacagtaacacggagggagtcaaaatggtctggaagatctctaacacatagtgagtgactgtaagttatttacactaattaggcaaaaaaaaaaaaaagtagtctgtatcaatggccatcgaattaaactttgtgcattctcaaattccatttcatggtttacattgcttaggtaaatgtggccaacattggtgtttttgatttttcttttcaaatatgagatgtaatttctatatgcatgctcaggctatgtactgtgtttgcctttctcaaaaaaaaaaaaaaaaagaaaaagaaaaagcaggctttcttctaccaataccaaatctacctattaagactgaaatacagaaagcaggctcatggctggtagagatactttttaacattccaagtgaaggaccataaattaaaacccactttttctgttgggctacagtagcccaagacttcatgtattttccctattacataatataaatgagagaatatgtgttgcattttaaactagtatagctgtttattgaagaggtggtcaggaaggggtttctcacagtttctcgtcaagaaaaagaatgtcattgttagctttgccagaatttgcttctattagtaagagttgccttgggtggcagaggcgtgggggcagggatggtatattgggataacttgtaagtttagagaccctgttggattttggtgacttgagaaaaatcgatcgttgacttggataaagaactgatagaagacaagaaggtagcttaaagattctccaggagagtatgttttatttgaccaacaattataaaagttggacaaaacccttcttcctttccccttatcagagcagtggtgagaacaacttcatcagggaagacagaatgaattagcttgtcccagcctcccacttctttatccctagaggagagattccagcttctttgactctaggcatcttgcagttctctgcccataatcccttaaggatggggctttccttagcctttctgtttcttactccatctgagatcaatatgttaatttaaaaaataccccaaaaattaggccttacgtatctacttggaaagatgtaaaaattcaaagcaaaggatgtgtatcactgattggcttctttaattgataatacaatatggtctttgaaactttctcatccctttataagtttgacgtctaagtggagaactcacaattcttacctacttcttacagaagtaccttaaaaattaataaaagattgtgtctgttccaggtacctgactagaataaacataatagttctatttttccatggagtaaagaaattttggaacttaccaaaaatacaagcaatagaactttctttataatgtattttgctatatatgggatttaggtatagtatagtaataatagtaataattaacatgtagtgcctcttgtattgcaggcattatttctaatgctttgcatatactagattaacttatttaatcttgaatataactctgtgaggttgatctttaacttacaaatgaggaaactgaagctcagataggcaatgtgcccaaatcacacattcattaaataatacatcctggtcatggtggctcactcctataatcctagcactttgagaggctgaggtgggtggatcacttaagcccaggagttggagaccagcctgggcaacatggcaaaaccctgactctatgaaaaaatacaaaatattagacaggtgtggaagcacatgcctgtagttccagctactcgtgaggctgaggagggaggattgtttgagcccagaagatgaaggttgcagtgagctgagatcacaccactacgtagactccagcctgggcaacagagtgaaaaactgtctccaaaaaataaaacaaaacaaaataaaataaaaataataattcggcctttatttgaacccaggcagtctgactcctgagtttaagcccttaattatgacattgctactacctctctctgtgcttatattattgtcagtacatgccttttgacccaaaaagaccgcatagcctccaatttgaacatcatcattctaaaggatttcatctgcattctacctatttcagtacataatccactgtataaaagctaagtattgttggagtcactgttaataaggtcttatgtaaatatttatattttctcatattgacaaataataacttctcaattataatagatcttgagaaagcaatctccattattatattttggatttctacttatttactcatgttttgataaattttaaaagtggtgactgctattcatagttcttctggttttgaatcatggcaaatatgtatacttctatagtcagaagcttgaggacagatttagttctctaaatgactgaggtgacacatccactttagtgcaaaattcaagactcatctcttcttcatatttgtgaggttctttctctaaatcttaataatgcatatacatttccgttagtgttaattcttttttcttctctcatgtaactaaattttagaggagtgttcattatcaaaataacctattacaaaaattcctagatttttatgaattgaatcagtctttcttagtggatttttttcatataagattgattttttatgtatggattattttatttgtaattatcttggtacattgtaattaattttttgctgctgttactctaaagttattagtatttgatgtatccggttgtcttttccatcagtatgattagacataataagtattctggcagtttgaataatgacacctttattgatctttgtgtattttaaaattttgccttctttaaaagatgaaactattctagttcacttttaattaaatccacatgtatgcttaaaaatgcaaattttataaaaatgtacatattatcacaggaagactaaaagacaaatgtacttagaaaagaaaaaatatcaattcaaatttagaaggacctgggttcacattaaaaattagaatggaaaggaaagcaaaaacataagattaccacgattactgactttacacctcattcaggggtttcatatccttaaaagaattcacttaaaaaattgaaccaaaaccatctgaaactcctctcagatcaaaagcccagaaaatcagacttcagtccctcagtggcagcattaagaacttaatccagtgaaaactgtggcagattagtgaaattaatgtaattaaaattgtagtcaagcaccatttctactcatacctgagagaaatctaaatgagaattccctgacctttcccaatataccgagagaaaggcttgaattttttgggaagacaatacaaacgggtaaaaatctggaatacaagaaaacttggaaaagtggacaggctgaaaaatatcacccataatcaagagttaagagagttaatagaaggaaatacacatataacttgtgtattaagaccatcagacaaataatttaaaatattcatcacaaacatgctaagttattaatgggaaaacatgcatataacaagagaagagatgaatctttagaaaaaaataaagctctaaaattagccaagcaaaaatttggaaatttaaaaatatagtaaatgaaataaaaatattcattaaacatcttaacagaaacttgaacattgttaaacaaagggttgtacatttgaaggtggatcaacagaaatgctatgaacaaaagcacagagaaacaacaacggaaaactaaaaaaatgatcagtgtatcagtgacctgtggtaccatatcaaatgagtaaacatatgtataattggagtcatagaaaaagagatgaaagggcaggaaaatataaagaaattacagtcaacatttttctaaacttggtgaaaaataatcaacccatatgtgtaagaaagacatcaaccagcaatctggataactacaaagaaaagtataatgggcaatattgtagtccgacctctgaagttaaacaaaaagaggctatctatcataaaaacagcctgaaaggaggaaaaaagaaaatgaaagtaaagcaattacaagagatatcatgaacatctcaccagaaattatggaaactgaaagatgatggaatacaatatttgtcaataaaaagaaagaaaaaagattttatcacagaatttcatcctgtgtccagagaaagagcttctcaaaataacagcatacctgcattacagaaagcactaaatgaagttcttcaaggtaagtgagaagtatacctcaactctaatctatagggaaaaattaagttcactggaaatgttcattatgtgggtaagcaactactccttttcttaatttatttgaaagacagctgacacttaacataacatagtgtggagtcactacatagtaaaatatgttaaaattgagtaatgggagaaagaaattacactgttgaagtccgaagtgttgaattacactgtggagtggtactataataatttaaggtcaaataggagaaggtaatgatgtgtatttaaatccctagagcaatatttttaaaaattgtaaataaaagcctagggaatgaggaaccaatagagtaaatagaaaacaaatagcaatctggcaaacttaaaccaatgatatcaataattatgttagatgcaaagggctgagacactcgaattaaaaggcggggaccattgaactggataaaaaagcaaggcccaagtttgggttgtagtctgtgctctggaataaatagttctgtgagatttcttgactctgtttctttatctgtcataaggagaaaagcaaacctgtctcactgcaaataggagtatggttggtacatagcaggtgttcaatgaacttgttgaattaatgaatgttgaatgaacataggcatgctgttactattaaatataaaattaaatgcaaacatatatatataactcattcaaaaattaaggtcaaattattggtgaactttctttattttttattttttgcttgcaatcaatggacaacttttattaacaagagatgtagccagggggacttttaatactgtcagatagaaaataaccaaaagagaaaagggcttttctgcaatggcagcaagttctgatgctagacttggtggagaagagattattttcctagcaagagccaaggaggacaataaactctcctgctgtggcattcataggcaaaggcatatgtggagttggcctcaattcagggaaagcagtacttctaacagtgcacatatttgtgatgcaggaggaaatctcagtgtccccagcagaagaaaagttagcacaatggacttgacctacaacttttagtatttatcattgcagataactgtccttatgcagacatcatcacttgctgcttggagaggcaaactgcatagcaagaagacaaagagctaatctgaaatactgaaaaattctgaatgggatctttgcagagtaagatacttttttaggaagaacattgtgcctataattattagcttaggaaaatgtaaaagaaatagttttcaatttttcaattactgaattattggcagctgatgacaataatgttggctagctttctgtttgaaaacttggcctccacagactctaaactatgacgaattatctttataaactgcttttatgaaatctggtttctgaagttggatcagtgagcataaaatggatttttggtatttcacgtatttttacattctttgtagtcttagtgctatttatttaaaagatgacttacggaagatgtttaggtatcattttggaggatttttctgcttataaattttatatatggaaaaggtgatattatgcttctaattcatcttcatgaaatgtaaaaaaaattccataggactcctaagtttaaagatttaaatagcataaaataatttttaaaataaagagttcttaaagtttatattatttaaccttgctatactagtatagcaagtttataaaatgagaatatgattaagcctagtctttatttatctatcttgtattattatttaaattttatatatttattagctcaaaaataatgttttctttctttaaattttttaaataaaaaattataaatatattattcttaagattatttactaattcatttttaagttgtgtaataactatcatttttccccatatttaatgatttgaatgtactttattcaatgtagtttattcaaacatcagtgttcaccataattatcaattttcttttacaataataaaagatcattatactttaatactgggagactcaatgcaaaaaaacaaataacaggagttttcaaactgtaggttataactaaaatgtttattaaatttgcatggaaatagatattactagtaaatctaaataaaatgatgctttttttctgataaagatttggtgatcaggcatactgtgatatattattattcacggaaaaaatcagttcagacagaccagaaatgtcattaaaatacctatcaagctcttgaactttccaaacattgagattaaaattgaagctgaagaggaaattttgggtaaatctgtggtcagagtaaaacttctggcatctccagtgtaaaatatattggtaaaataaaacactagggaagaatgtactttcactgagctgtggtcagaaacttttgatttaacctagtaactaaaacatgtgttctgatataagagtcttgtaaaattagtacctcttgccactgccaaactaagcaggcatctaggcaaataagtatgccaagctgtccagtgaaatggcggcttcttgttcaacaggtctattcatacgtctagtgtgagggactggagtgatgtccagtgaaagagaaagggaattcctgtacaacaggctgtaacagaaggctggagagagtatagctgaggtaggatggtgatggtgtattgctgatcctgctggaaggaagcaaactgttccattggtctcttacaaacagaaaaatcattcattaaatcaatacgtccctatcaggtgccagaggaaatgttcattcgctccatcagcaaaaccagatctggaagaaaaattgcatcgaaatcaccacctgattgcatttagaataacatatcatattctacaagaataatccatcagtcttctgcctaagccaaacaggcagttgaatagggatggcataggaatcatcacctctgaatctttcaagttcttgatagtggcctgaatcttgaaaatttccccggtaatgcaggattgctttcaatttactatgctttacgtagagtcagttccagtggcttccacttggcttttttttttttttttttttagaaggagtatcgccctgtcacccaggctggagagcaatggcgcgatctcggctcactgcaacctctgcctcccgggttcaaacgattctcctgcctcagcctctgagtagctgtgattacaggaacacttggcctttctaatcttaatagctctcactctataagtcaagaaatcagtgtggccattctaccagttgctgagtatgtctatttgaactatgcattccagaactggaatgtaactattggttgagttggggacccatttggcacactgagaaatataactaagccaaaactccattaatcagctcacttccatacattccctttctgattggcagattaccatgagattttaggtctctaagaattagtggttcagagccaatggccaatatcaccaaaactctagttattttgtccccctccccacccaccatgcacagtcactctgctgaatgtgtgcaggtaacactggggaacacgagaggcaagatctgtagcataggattgattttgttgataccataggatccttccttaggacaacccagtttcctctttgtttaagggactctggaactgtgaactgactcaagacttggaataaatcacaactctattgtggtgatttgtatcagtcctctttccctcagatctatagtttttgttttgtttctgagacagagtctttgtcacccagtctagagtgcagtggtgcgatctcagctcactgcaacctctgtctcctgggttcaagagattctcatgcctcagcctcctgagtgtctgggattacaagcatgtgccaccatgcccagctaattttttccagttttagtagagacatggtttcactgtgttggccaggctgagtgccaactccttggcctcccaaagtgctggaattataggcatgagccaccaggccgggccagaactatagtttttaatgtgttcagattaagcaaaatgttaaataatctgactacaatttcttcttggggacacaatgataactaagattaacattttttataagtcacatcactgtgattccagaactgggatataattatgggttgagttggggacccatttggcatactaagaaatataaccaagccaaaactccattaatcagctcactttcatatattttcttttatttatattctgattactgactttggtttgtttctcaacccattaaccatgtccatcttggccttggcaattgagtaggaatacttggcctctgctattccaagatctgttatctccattgaatttagaaagcttagtttgatagaagcaatttatcctcttattcctggcttataaagaatagttatcacgcagcttttcaaggaggctggtgctcccttcccagtgtatttcctaaggttgtggtgaagatagtgtcctctgaaatatcctccagaacaagattagggtatgggtgagcagttctcacaataagcccactccagtattctcatctcttggagcctttggataacatgtgacccagcaattccaaatatatatatgatacattctagatatatatatattctttctttatataggatatatatacacacacacacacatacacataaggtattatgtatagggcatatatgtatgtgtgtatgtgtgtgtgtgtatatatatatatatacttagaagtggaattagattagaattagattccatttctaggcatatacattttcaagagaaatagaaatatagatccatacaaaacttgtatgcaaatatttataacattattataaatctcttagatttccaagagaaatggaaatataggtcaatataagtacttgtacacacaaatatttataacaacattattcatgatagccaatatgttgaaacaattgaaatggctgttaactgagcaaaaatgggtacacaaaatgagatatatctgtaagtgcaataccattcagcaacaaaaagaaacaaaggactgatacatgctgcaacatgaaacagtcgtgaaaacattatgctgagtgaaagaattcagtcgaaaagaatcacatactcattatcgaatttatatcaaatgtccataattggaaaacctataaagaccggaaatagaatagtagcagttgtccaatgctggggctggaggcaggatggtagggagggagggatcagaggagtgatagctaagagatggggtcatggaaatattttaaaattgattgtggtgatgatggcagaatcctgtgaatatattaaaagccactgaaatacactttaaatgggtgaattgtatagtatgtgaattataacttaataaagctgttacatttaaaaggcggtgagggtgggtattaaggaagtttcctggcaaggcattacaggtttctcagacaaggagaggctaatctcatcagaaagggaagaaaaaattgctttcactggcaaaggagacttgatcagattgggagttaaggtctctaaactcataagaaactgcctatatgaccctattcccgtatttttaatggtctcacttctttccaaatttaatagataagattccataaggttagtgttgagaattcttgactttgtagcaccaggaaatggggatttctctcagggtagccatagacatttcatggtttataattggaccttgatatagacagttaaagtcctgagctaatcaacttcttttcattaggtctctagcatatttgaaagctgccaagaaaacccacagtctttatatccttcagtttttctaaaatattttatatccgcagccacttgatcacccagcatcttgtcctccaagaacacttgctcctgaccttagatgcctacaggtgataatttaggtattgtttgccactgcatgctacagactgccagtgtcttattcaccatggcaataaggaaatttatatctagtcagatgagagaatcaataccagattcccatctttaaggttctattttcctgaaaccacttctggtacaagtcactgtgtcagttagaattcagtaagggaagcagagccatatgagtattatgagatatggatctattatgtgaggtggactttccacagttgtgaacaaagcagttaagtgaaagtccagaaaggaaagttggagaatcacacaaaagccactagccattcctcctgaaatgctgaaccggggatgagttggaggagatgctgaaatgcattttaagagtgtagggcacccacggtgtaactgcagaaagggagctcatggatgggtctgtggaaagctattgcctctatatgactgttgcctctgggtctgtagccaaaaattttatggtgatctcagaattggtgttactcagctgagacagcagccaagatcaatatctggaaaacagcacagaagagagaagcagaaattggaaagtgttgttcaagattatccaagttgactttagtacaatccagcacattgtcattctgagtcattggccatagtggtctccgaaggactgaagtaggcaggtgaatgaaaagaggggaaacaggaaaaaaaaaaaaaagaactcctggttttactttcaccagtcagtcacagtaggccagttttaaaccatacactactacagttattggttattatcaaggattaaaaacttgatactatttttggttgtctcacatctgtcctagatgagacctagaatataataggttcttaacatacatctattggttgggtgaatgaattcatgagtgaatgaatgaggatttgggtttcaaagtcttctcactgctttctaactttatcttcatgttatttttgcactcatactgataatagccatttgccctaggggtagagaactcaggaaccctgtggctgatgcacaataaaagaaggaaagaataaaggcaggcatttcataattgaggcggaggttcagcagaccatacagattaaaaatagtgcttctatccaagtggaaacatcacaaacttcctattaaagaaaaccatgacctctcttgacccactgtgggaaggtggtcggcaaggatcatggtcataccttgaagaagtgattgatctgtcaattagtgacttccacattttcccatgtgctatggcctgaatgtctgagttccctcaaaattcatgtgttaaaatcctaacccccaaagtgatgatattaagaggtggggtctttgagaggggattagttccagaggccagagtcctcttgaatggaattagtgtgcttgtaaaagagatcccagaaaggtcccttgcctcttctgccatgtgagattgtaatgagaagacagctgtctatccagagaggggaccctcaccagacaccaaatctgttggcacctggatcttgcactttccagcttccacaactataagaaataagtgtctgttttttataagtcctccatctgtgggtttttttgttaaagtaccttgaatgaactaagacaccatgtaaaacacccttgagaaaaaccttcagtactgaaaactgtttccctgtagtttggaactaaaatggataataatctgaaatgcccaaacatagactaaggctcccaaagttctcagaattgagataagatccaagtttttgtaaagcctaaaaatttatggtatgagaagatctctttaagaaaagtaatacaaaattatgaatagaattaagtgctttcttagaataataaagtaaattatgacaaattacaaatataaaaagctactaactaccaaaaatatagcaaatttcctccccaataagcagaatatgatttattaattaatttcccaactcacatgcttaatactttctctctacataatctggctactatattttttgattctctttgtatatgacaatgatcttgccatatcattttctatggaaagaatagaaagacaattttgcttcacatagcacaactgattgaaatttgttttatttttattttcatttttttggtagagatgggatctctgtgttggccaggctggtcttgaattcctggcctgaagctatcctcccgcctaggcctcccaaagtgctgggattacaaatgtagccaccatgcccagcttttattagaaaattttatttcactttaacaacttgttatgggaaacattatttaaattttttgaattttgatcaaatttgcaaaaagctcagtctagttttcttcgtatatgagatatatgatttcaggtactcttctgcgttgactagtgttttgaatcaatgatatacatgaaatagttcatcatcaatgtcctcattgcagtggcatattaagagttttatactgacattgacgtgtcaacatttcatgtcaaatccacaatcatcattacctggcttatcaaacaattcaagaattattcattacttctgtttaaaacttctaattactttgattaatacttctttgatatgatctgagcatttttttttgctcaggtttttctttatgtcaacataatttacattaatcatcttactgctttcatttcatattggattcatgttatatgagttttccccagtgctttaataaagaaattttaaaagacaaaagaaagtacttttcatatgcatccaattcaaggatctgtcgtttcacactttttaactgaaatattccaatataactttccaaatgcaaagaatgtattcgaactttatcaacttttgaataaacttttgcatcttggtttgttcaagcctttctttcaaatatccagaacatatttagagtcctttaagttttacaacaactccttaaagggtagaccattttattatatttagactcaaaaacagagcaaaacgaaagatcagccaaccaaccacacacaaaaagattccaaagaggccgggcacggtgactcatgcctgtaatcccagcactttgggaggccaagcctggcggattgcctgagatcaggagttcaagaccagcctggttaacatggtgaaattctgtcactactaaaaatacaaatattaaccaggcgtgatggtgggtgcctgtaatcccagctactccggaggctgaggcaggagaatcgctggaacccgggaagcggaggtggcagtgagccaagatacgctcctgcactccagcctgggtgacagagcaagactccgcctccaaaaaaaaaaaaaaaaaaaagaagaagaaaagaaaagaaaagaaaaaagactccaaggatctggcaaggatattttacagttagatctcttgagaaaaaacatataaatgttgcaaaacatgaagtagtcaacaacttcaggcaggtctttcttcaaagatcacgtgagggaagtctttcttcatagatcatgttctacaaactttaaaatgttgttcaatggctggttacatctctctagaactaatttcattttgttgaataacatcacagatacatggtcttacaatggtgaaaaaggtaaaagtcacttgcttggttttctgctataatagaacacccaatacatatcaatattctgtaatttatcagttataatgtatcagtcatagcatgcatctatggtggaatctacagcaatgaagtgatatttgatgtctggattatttattttatttgttatttcattttacagatatttccggttattttgatcaacttttgtgggcaaatcagttacattttatccattttgatattttcccaagttcttgtgcaaaaacaaatcagttcagcaatcagtttgaagttaaccatgaattttattattctaagattgtaacttagtgacaaagaattttgaaggacgaacttcttttgcttaaaaatacactaattataagtattttttaaagcaattgaaagaaacattatttttattatgtgtttaatacattgtcctggtgcatttttatttatttacatgacattcaaataaacaacctgcttagtctttgtgaagtagtctcgagggctttcaacatattcttccagaaaaatatgcattattaagtaatgttggtcttgctaagagtgatttaaaaataaaataaccagcctggccaacatggtgaaaccccatctctactaaaaatacaaaaattagctgggcatgatggtgcatgcctgtaattccagctacttgggaggctgaggcaggagaatcgcttgaactcgggaggtgagctgagatcacaaccattgcactccagcctgggccacagagcgagactctgacttaaaaaaataataataataataataaaataatatatgcaacctccagttagattaggctatcataaatgagtttagctatttttaattttcttaattttttgtttgagaaacatctcttctggccattataagttctgtttgagtgatagatctgtttgatattattgaaatccatctgactttctttaaacagtgttgaatgaaattattcttcattgtaacaggcatggttcttatttaagtcaatgaattcatcaaaattaaggcacttgttgatctcatgtatgcgctaatgtctgatgtccatacaaactgatttacttcataagaattttatcttctgcatgttttttcctgtttgatagtgccctgattcttctaattatcctgtttcttcttgtcattttcattatctatattttctagattactgtaattctattactggttattatgattttgaccagagtttttaatcttcagtacttatgtatgaaggatctttaatatgtagaagtttcacccagtcttttttctttcaggttatgtttttagcttccattaggatattttcttcctgccatatctgaattttgagataataatcaacagttctgaaaaaatgtaaaattaatctgaagttaaagcatacacaagagaaatttaaatgattttaaattgccactgcttgtgttaggttacatagttgtgtactcatcatttttacacaacttacactgctgattatttacataattaatagctttgtcgctctaacacttgtttctttggccaattttattgtcttagtgacagattttaccaggaactaccagatttttccaggacaagaagcatcagagattctgaaacataattcaaaactcttagaatgcataaaacatgtgattctacttacagctatatttgaattttttagtattccataggtttacatcttacaaacatggagactctgacaaattttagtgttgcttttctgttcaaaaaagaaaaacaaagtatggtgcatttgtaattgtatatgccgccatgtttgttaataatatttctgatgggagagaacttctattatgactagataccaacaagaaacaaatcttacagttaacaattttatatttctgatgcggaagaattgcccacatcctactttctggctacgcatatttcaaaatcttatttttcctctactgctgacatactaccactggtgtgtgtcagaggacatattaatatcacaatacaccttctggttctgatgttcatgaaggaatgctaagagaatcagcacagtggacagcaggaatgttcccagaagcgacttatcttctgttctgggtaaattagcaatcacataactgtacatgtatgttattgttgtaggactttctccgtagttgagccaagagctaggtccttgtcacacagccatgaaatattaggcttgcaaacactttaaagggtgagaaaaatggaactttttggtcaaaaagggaaacagggactctcagcagaatgagggtcctgctatacacgcttcctgcctcacagattgaatcccagattccaccaaggaagaggaggggccaggctcttcgcagcggcgaatggggtgaacttccttagctccaccccagtacgtcctcctcccagtgcacaaaccagtcagaggttcccgggggacccctttcttgtctgtctctttattgccaatcacaaaaatatatcccactaacctaaatgtatttctacattaatttcatattgtgtaactatgaaaatgttgattactattccaaagtcatcaaccacaaggggaagtataatacaacagagttggaattgaataaaattgacaaacttaaggaattgcagttaacatatctcacttttgcaaaatatacgaagacttgtgatcttgagaacacattgctcgggcttctcccaggtcctggctagggttagtggaagggaagggtcctggaacataagcttcactgtttcatggtacatccacctcagctcgaaattcttgcatcttttagatttcagcttccatctgagtaacaacattaggtgatatttcaaggatcagtgtggaccagttctaattagacagacagaaagtgttgcagtgacaacaattgtaagaaatacccaacaagctctagtcacaggggtttctaaggtttaaacccaagctggatttctttcaagatgctacctctgctgctctctcaactttcttttcatctcactgtaagtaagagggtaggtccttgtgcctttggcacttaggaagagcgtgttttaaatgaatagattctacactttacattcaatgtaaggaaggtcagggtgctgggttgaagccacagcaagaaagttacaggattctgagaaaagaataaatgcccctattttttctgataaaaaatttaaccgattatgcctgtttacttgctctacttacgtatattttcctttagctatttatcttggatgcttgacccctttggactaaggcattattctaaataccaccttgcagagggggactactgcataaactaggcagtgaatcaaagctgctggctacagttgtagagggtgacacagcctcactgacccagctggaaatttctaccaagaatgtcacttcttttcatttagttcttcaaaaatgctctaaaaacacttcagaaagcaaaagaaagggattatgtaataagcccctctgcacacaccccatacttcttatttgaagtaaatccacttcaaataaacagattcctttaaaaaatgttcagctttatttttttcaatctaaactttacattctattgaataagttttacattgaaagcatttctgaacaaatgcctgtttagtatttattttcttctctccctactcccaactgcacttgaactttaaagggcaaaggtagtcattggtgttttacggatgcacgacaagtacctaaaccactacctggatcaaagcagccacttttgccgaaggggtgcatcattcagacaaggctcatgctccagagagatctgttatatttacactgtggattgtcaaacctgcagatctaactctctgtacctgtgcagctaagtcatgtatctcaaaggcatcaattaaaatattttagggttacttgtgagataagattttaatacagattaatctaaacaagctgtcaaccagcagataacaggaccttgaagacttacgacacagagaagcaattaatatggaggtcaggaataggagaagg
